(19) United States
(12) Patent Application Publication
(10) Pub. No.: US 2018/0044415 A1
(43) Pub. Date: Feb. 15, 2018

(54) ANTI-DLL3 CHIMERIC ANTIGEN RECEPTORS AND METHODS OF USE

(71) Applicant: ABBVIE STEMCENTRX LLC, NORTH CHICAGO, IL (US)

(72) Inventors: PAUL ANTHONY ESCARPE, SAN BRUNO, CA (US); SCOTT J. DYLLA, EMERALD HILLS, CA (US); DAVID LIU, SAN FRANCISCO, CA (US); ROBERT A. STULL, ALAMEDA, CA (US)

(73) Assignee: ABBVIE STEMCENTRX LLC, NORTH CHICAGO, IL (US)

(21) Appl. No.: 15/553,102

(22) PCT Filed: Feb. 23, 2016
(86) PCT No.: PCT/US16/19192

§ 371 Date: Aug. 23, 2017

Related U.S. Application Data
(60) Provisional application No. 62/119,793, filed on Feb. 23, 2015.
(60) Provisional application No. 62/241,662, filed on Oct. 14, 2015.
(60) Provisional application No. 62/296,560, filed on Feb. 17, 2016.

(51) Int. Cl. C07K 16/28; C12N 5/0783; A61K 35/17; C12N 15/86; C07K 14/725; C07K 14/705

(52) U.S. Cl. CPC C07K 16/28; C07K 14/7051; C07K 14/70578; C07K 16/2815; A61K 35/17; C12N 15/86; C12N 5/0638; C07K 2317/622; C07K 2317/56; C07K 2319/02; C07K 2319/03; C12N 2740/15043; C07K 2317/24; C07K 2319/74; C12N 2510/00

(57) ABSTRACT

Provided herein are novel anti-DLL3 chimeric antigen receptors and methods of using the same to treat proliferative disorders.

### CROSS REFERENCED APPLICATIONS

[0001] This claims the benefit of U.S. Provisional Application No. 62/119,793 filed on 23 Feb. 2015, U.S. Provisional Application No. 62/241,662 filed on 14 Oct. 2015, and U.S. Provisional Application No. 62/296,560 filed on 17 Feb. 2016, each of which is incorporated herein by reference in its entirety.

### SEQUENCE LISTING

[0002] This application contains a sequence listing which has been submitted in ASCII format via EFS-Web and is hereby incorporated by reference in its entirety. Said ASCII copy, created on Feb. 19, 2016, is named S69697_1250WO_sc1605pct_ST25.txt and is 612 KB (626,688 bytes) in size.

### FIELD OF THE INVENTION

[0003] The present invention generally relates to adoptive immunotherapy comprising the use of novel chimeric antigen receptors incorporating a DLL3 binding domain. In preferred embodiments the disclosed chimeric antigen receptors are useful for the treatment or prophylaxis of proliferative disorders and any recurrence or metastasis thereof.

### BACKGROUND OF THE INVENTION

[0004] Differentiation and proliferation of stem cells and progenitor cells are normal ongoing processes that act in concert to support tissue growth during organogenesis, cell repair and cell replacement. The system is tightly regulated to ensure that only appropriate signals are generated based on the needs of the organism. Cell proliferation and differentiation normally occur only as necessary for the replacement of damaged or dying cells or for growth. However, disruption of these processes can be triggered by many factors including the under- or overabundance of various signaling chemicals, the presence of altered microenvironments, genetic mutations or a combination thereof. Disruption of normal cellular proliferation and/or differentiation can lead to various disorders including proliferative diseases such as cancer.

[0005] Conventional therapeutic treatments for cancer include chemotherapy, radiotherapy and immunotherapy. Often these treatments are ineffective and surgical resection may not provide a viable clinical alternative. Limitations in the current standard of care are particularly evident in those cases where patients undergo first line treatments and subsequently relapse. In such cases refractory tumors, often aggressive and incurable, frequently arise. The overall survival rates for many solid tumors have remained largely unchanged over the years due, at least in part, to the failure of existing therapies to prevent relapse, tumor recurrence and metastasis. There remains therefore a great need to develop more targeted and potent therapies for proliferative disorders. The current invention addresses this need.

### SUMMARY OF THE INVENTION

[0006] In a broad aspect the present invention provides novel chimeric antigen receptors (CARs) comprising a DLL3 binding domain that specifically binds to human DLL3 protein (DLL3 CARs). In certain embodiments the DLL3 protein is expressed on tumor initiating cells. Through genetic modification (e.g., transduction) the DLL3 CAR are expressed on cytotoxic lymphocytes (preferably autologous) to provide DLL3 sensitive lymphocytes that are used to target and kill DLL3 positive tumor cells. As will be discussed extensively herein the CARs of the instant invention generally comprise an extracellular domain comprising a DLL3 binding domain (which may be derived from an anti-DLL3 antibody), a transmembrane domain and an intracellular signaling domain that activates certain lymphocytes and generates an immune response directed to DLL3 positive tumor cells. Selected embodiments of the invention comprise immunoactive host cells expressing the disclosed CARs and various polynucleotide sequences and vectors encoding the DLL3 CARs of the invention. Yet other aspects include methods of enhancing T lymphocyte or natural killer (NK) cell activity in an individual and treating an individual suffering from cancer by introducing into the individual host cells expressing DLL3 CAR molecules. Such aspects specifically include the treatment of lung cancer (e.g., small cell lung cancer), melanoma, breast cancer, prostate cancer, colon cancer, renal cell carcinoma, ovarian cancer, neuroblastoma, rhabdomyosarcoma, leukemia and lymphoma.

[0007] As discussed in more detail below, the term “antibody” as used herein shall be held to mean intact antibodies (e.g., IgG or IgM) as well as any immunoreactive fragments (e.g., Fab fragments) or immunoreactive constructs or derivatives thereof (e.g., scFv). In certain embodiments the DLL3 binding domains (and DLL3 CARs) of the instant invention will comprise scFv constructs and, in preferred embodiments, will comprise scFv constructs that compete for binding with antibodies comprising heavy and light chain variable regions as disclosed herein. In other preferred embodiments the DLL3 binding domains (and DLL3 CARs) of the invention will comprise scFv constructs comprising heavy and light chain variable regions disclosed herein or fragments thereof. As such, for the purposes of the instant disclosure the term “antibody” shall be used generally and will expressly be held to include immunoreactive fragments, constructs or derivatives thereof unless otherwise contextually dictated.

[0008] In selected aspects of the invention the CAR binding domain binds specifically to hDLL3 and will be derived from, comprise or compete for binding with an antibody or antibody fragment comprising: a light chain variable region (VL) of SEQ ID NO: 21 and a heavy chain variable region (VH) of SEQ ID NO: 23; or a VL of SEQ ID NO: 25 and a VH of SEQ ID NO: 27; or a VL of SEQ ID NO: 29 and a VH of SEQ ID NO: 31; or a VL of SEQ ID NO: 33 and a VH of SEQ ID NO: 35; or a VL of SEQ ID NO: 37 and a VH of SEQ ID NO: 39; or a VL of SEQ ID NO: 41 and a VH of SEQ ID NO: 43; or a VL of SEQ ID NO: 45 and a VH of SEQ ID NO: 47; or a VL of SEQ ID NO: 49 and a VH of SEQ ID NO: 51; or a VL of SEQ ID NO: 53 and a VH of SEQ ID NO: 55; or a VL of SEQ ID NO: 57 and a VH of SEQ ID NO: 59; or a VL of SEQ ID NO: 61 and a VH of SEQ ID NO: 63; or a VL of SEQ ID NO: 65 and a VH of SEQ ID NO: 67; or a VL of SEQ ID NO: 69 and a VH of SEQ ID NO: 71; or a VL of SEQ ID NO: 73 and a VH of SEQ ID NO: 75; or a VL of SEQ ID NO: 77 and a VH of SEQ ID NO: 79; or a VL of SEQ ID NO: 81 and a VH of SEQ ID NO: 83; or a VL of SEQ ID NO: 85 and a VH of SEQ ID NO: 87; or a VL of SEQ ID NO: 89 and a VH of SEQ ID NO: 91; or a VL of SEQ ID NO: 93 and a VH of SEQ ID NO: 95; or a VL of SEQ ID NO: 97 and a VH of SEQ ID NO: 99; or a VL of SEQ ID NO: 101 and a VH of SEQ ID NO: 103; or a VL of SEQ ID NO: 105 and a VH of SEQ ID NO: 107; or a VL of SEQ ID NO: 109 and a VH of SEQ ID NO: 111; or a VL of SEQ ID NO: 113 and a VH of SEQ ID NO: 115; or a VL of SEQ ID NO: 117 and a VH of SEQ ID NO: 119; or a VL of SEQ ID NO: 121 and a VH of SEQ ID NO: 123; or a VL of SEQ ID NO: 125 and a VH of SEQ ID NO: 127; or a VL of SEQ ID NO: 129 and a VH of SEQ ID NO: 131; or a VL of SEQ ID NO: 133 and a VH of SEQ ID NO: 135; or a VL of SEQ ID NO: 137 and a VH of SEQ ID NO: 139; or a VL of SEQ ID NO: 141 and a VH of SEQ ID NO: 143; or a VL of SEQ ID NO: 145 and a VH of SEQ ID NO: 147; or a VL of SEQ ID NO: 149 and a VH of SEQ ID NO: 151; or a VL of SEQ ID NO: 153 and a VH of SEQ ID NO: 155; or a VL of SEQ ID NO: 157 and a VH of SEQ ID NO: 159; or a VL of SEQ ID NO: 161 and a VH of SEQ ID NO: 163; or a VL of SEQ ID NO: 165 and a VH of SEQ ID NO: 167; or a VL of SEQ ID NO: 169 and a VH of SEQ ID NO: 171; or a VL of SEQ ID NO: 173 and a VH of SEQ ID NO: 175; or a VL of SEQ ID NO: 177 and a VH of SEQ ID NO: 179; or a VL of SEQ ID NO: 181 and a VH of SEQ ID NO: 183; or a VL of SEQ ID NO: 185 and a VH of SEQ ID NO: 187; or a VL of SEQ ID NO: 189 and a VH of SEQ ID NO: 191; or a VL of SEQ ID NO: 193 and a VH of SEQ ID NO: 195; or a VL of SEQ ID NO: 197 and a VH of SEQ ID NO: 199; or a VL of SEQ ID NO: 201 and a VH of SEQ ID NO: 203; or a VL of SEQ ID NO: 205 and a VH of SEQ ID NO: 207; or a VL of SEQ ID NO: 209 and a VH of SEQ ID NO: 211; or a VL of SEQ ID NO: 213 and a VH of SEQ ID NO: 215; or a VL of SEQ ID NO: 217 and a VH of SEQ ID NO: 219; or a VL of SEQ ID NO: 221 and a VH of SEQ ID NO: 223; or a VL of SEQ ID NO: 225 and a VH of SEQ ID NO: 227; or a VL of SEQ ID NO: 229 and a VH of SEQ ID NO: 231; or a VL of SEQ ID NO: 233 and a VH of SEQ ID NO: 235; or a VL of SEQ ID NO: 237 and a VH of SEQ ID NO: 239; or a VL of SEQ ID NO: 241 and a VH of SEQ ID NO: 243; or a VL of SEQ ID NO: 245 and a VH of SEQ ID NO: 247; or a VL of SEQ ID NO: 249 and a VH of SEQ ID NO: 251; or a VL of SEQ ID NO: 253 and a VH of SEQ ID NO: 255; or a VL of SEQ ID NO: 257 and a VH of SEQ ID NO: 259; or a VL of SEQ ID NO: 261 and a VH of SEQ ID NO: 263; or a VL of SEQ ID NO: 265 and a VH of SEQ ID NO: 267; or a VL of SEQ ID NO: 269 and a VH of SEQ ID NO: 271; or a VL of SEQ ID NO: 273 and a VH of SEQ ID NO: 275; or a VL of SEQ ID NO: 277 and a VH of SEQ ID NO: 279; or a VL of SEQ ID NO: 281 and a VH of SEQ ID NO: 283; or a VL of SEQ ID NO: 285 and a VH of SEQ ID NO: 287; or a VL of SEQ ID NO: 289 and a VH of SEQ ID NO: 291; or a VL of SEQ ID NO: 293 and a VH of SEQ ID NO: 295; or a VL of SEQ ID NO: 297 and a VH of SEQ ID NO: 299; or a VL of SEQ ID NO: 301 and a VH of SEQ ID NO: 303; or a VL of SEQ ID NO: 305 and a VH of SEQ ID NO: 307; or a VL of SEQ ID NO: 309 and a VH of SEQ ID NO: 311; or a VL of SEQ ID NO: 313 and a VH of SEQ ID NO: 315; or a VL of SEQ ID NO: 317 and a VH of SEQ ID NO: 319; or a VL of SEQ ID NO: 321 and a VH of SEQ ID NO: 323; or a VL of SEQ ID NO: 325 and a VH of SEQ ID NO: 327; or a VL of SEQ ID NO: 329 and a VH of SEQ ID NO: 331; or a VL of SEQ ID NO: 333 and a VH of SEQ ID NO: 335; or a VL of SEQ ID NO: 337 and a VH of SEQ ID NO: 339; or a VL of SEQ ID NO: 341 and a VH of SEQ ID NO: 343; or a VL of SEQ ID NO: 345 and a VH of SEQ ID NO: 347; or a VL of SEQ ID NO: 349 and a VH of SEQ ID NO: 351; or a VL of SEQ ID NO: 353 and a VH of SEQ ID NO: 355; or a VL of SEQ ID NO: 357 and a VH of SEQ ID NO: 359; or a VL of SEQ ID NO: 361 and a VH of SEQ ID NO: 363; or a VL of SEQ ID NO: 365 and a VH of SEQ ID NO: 367; or a VL of SEQ ID NO: 369 and a VH of SEQ ID NO: 371; or a VL of SEQ ID NO: 373 and a VH of SEQ ID NO: 375; or a VL of SEQ ID NO: 377 and a VH of SEQ ID NO: 379; or a VL of SEQ ID NO: 381 and a VH of SEQ ID NO: 383; or a VL of SEQ ID NO: 385 and a VH of SEQ ID NO: 387; or a VL of SEQ ID NO: 389 and a VH of SEQ ID NO: 391; or a VL of SEQ ID NO: 393 and a VH of SEQ ID NO: 395; or a VL of SEQ ID NO: 397 and a VH of SEQ ID NO: 399; or a VL of SEQ ID NO: 401 and a VH of SEQ ID NO: 403; or a VL of SEQ ID NO: 405 and a VH of SEQ ID NO: 407. In particularly preferred embodiments the DLL3 binding domain will comprise a scFv construct comprising the aforementioned VL and VH sequences or fragments thereof. In some aspects of the invention the CAR binding domain comprises a chimeric, CDR grafted, humanized or human antibody or an immunoreactive fragment thereof. In other aspects of the invention the CAR binding domain comprising the aforementioned sequences is an internalizing antibody.

[0009] Yet other preferred DLL3 CARs of the instant invention will comprise CDR grafted or humanized antibodies, or fragments or constructs thereof, comprising one or more heavy (CDRH1, CDRH2, CDRH3) or light (CDRL1, CDRL2, CDRL3) chain CDRs as set forth in FIG. 1A or 1B wherein the CDRs are derived as per Kabat et al.

[0010] In yet other compatible embodiments the CARs of the instant invention will comprise the binding region (e.g., in the form of a scFv) derived from one of the CDR grafted or humanized DLL3 antibodies hSC16.13, hSC16.15, hSC16.25, hSC16.34 and hSC16.56 or fragments thereof.

[0011] Other embodiments are directed to CARs comprising an antibody or antibody fragment or construct thereof wherein said antibody comprises:

[0012] an antibody light chain comprising a light chain variable region CDR1 comprising SEQ ID NO: 408, a light chain variable region CDR2 comprising SEQ ID NO: 409 and a light chain variable region CDR3 comprising SEQ ID NO: 410; and

[0013] an antibody heavy chain comprising a heavy chain variable region CDR1 comprising SEQ ID NO: 411, a heavy chain variable region CDR2 comprising SEQ ID NO: 412 and a heavy chain variable region CDR3 comprising SEQ ID NO: 413.

[0014] In another embodiment the invention is directed to CARs comprising an antibody or antibody fragment or construct thereof wherein said antibody comprises:

[0015] an antibody light chain comprising a light chain variable region CDR1 comprising SEQ ID NO: 414, a light chain variable region CDR2 comprising SEQ ID NO: 415 and a light chain variable region CDR3 comprising SEQ ID NO: 416; and

[0016] an antibody heavy chain comprising a heavy chain variable region CDR1 comprising SEQ ID NO: 417, a heavy chain variable region CDR2 comprising SEQ ID NO: 418 and a heavy chain variable region CDR3 comprising SEQ ID NO: 419.

[0017] In another embodiment the invention is directed to CARs comprising an antibody or antibody fragment or construct thereof wherein said antibody comprises:

[0018] an antibody light chain comprising a light chain variable region CDR1 comprising SEQ ID NO: 420, a light chain variable region CDR2 comprising SEQ ID NO: 421 and a light chain variable region CDR3 comprising SEQ ID NO: 422; and

[0019] an antibody heavy chain comprising a heavy chain variable region CDR1 comprising SEQ ID NO: 423, a heavy chain variable region CDR2 comprising SEQ ID NO: 424 and a heavy chain variable region CDR3 comprising SEQ ID NO: 425.

[0020] In another embodiment the invention is directed to CARs comprising an antibody or antibody fragment or construct thereof wherein said antibody comprises:

[0021] an antibody light chain comprising a light chain variable region CDR1 comprising SEQ ID NO: 426, a light chain variable region CDR2 comprising SEQ ID NO: 427 and a light chain variable region CDR3 comprising SEQ ID NO: 428; and

[0022] an antibody heavy chain comprising a heavy chain variable region CDR1 comprising SEQ ID NO: 429, a heavy chain variable region CDR2 comprising SEQ ID NO: 430 and a heavy chain variable region CDR3 comprising SEQ ID NO: 431.

[0023] In another embodiment the invention is directed to CARs comprising an antibody or antibody fragment or construct thereof wherein said antibody comprises:

[0024] an antibody light chain comprising a light chain variable region CDR1 comprising SEQ ID NO: 432, a light chain variable region CDR2 comprising SEQ ID NO: 433 and a light chain variable region CDR3 comprising SEQ ID NO: 434; and

[0025] an antibody heavy chain comprising a heavy chain variable region CDR1 comprising SEQ ID NO: 435, a heavy chain variable region CDR2 comprising SEQ ID NO: 436 and a heavy chain variable region CDR3 comprising SEQ ID NO: 437.

[0026] In certain preferred embodiments each of the aforementioned antibodies comprises humanized antibodies. Moreover, as described herein nucleic acid sequences encoding such exemplary murine and humanized heavy and light chain variable regions are set forth in the attached sequence listing.

[0027] In other embodiments the CARs of the present invention comprise an antibody or antibody fragment or construct thereof residing in a bin defined by a reference antibody selected from the group consisting of SC16.3, SC16.4, SC16.5, SC16.7, SC16.8, SC16.10, SC16.11, SC16.13, SC16.15, SC16.18, SC16.19, SC16.20, SC16.21, SC16.22, SC16.23, SC16.25, SC16.26, SC16.29, SC16.30, SC16.31, SC16.34, SC16.35, SC16.36, SC16.38, SC16.41, SC16.42, SC16.45, SC16.47, SC16.49, SC16.50, SC16.52, SC16.55, SC16.56, SC16.57, SC16.58, SC16.61, SC16.62, SC16.63, SC16.65, SC16.67, SC16.68, SC16.72, SC16.73, SC16.78, SC16.79, SC16.80, SC16.81, SC16.84, SC16.88, SC16.101, SC16.103, SC16.104, SC16.105, SC16.106, SC16.107, SC16.108, SC16.109, SC16.110, SC16.111, SC16.113, SC16.114, SC16.115, SC16.116, SC16.117, SC16.118, SC16.120, SC16.121, SC16.122, SC16.123, SC16.124, SC16.125, SC16.126, SC16.129, SC16.130, SC16.131, SC16.132, SC16.133, SC16.134, SC16.135, SC16.136, SC16.137, SC16.138, SC16.139, SC16.140, SC16.141, SC16.142, SC16.143, SC16.144, SC16.147, SC16.148, SC16.149 and SC16.150. In still other embodiments the CARs of the invention will comprise antibodies (or antibody fragments) from bin A, antibodies from bin B, antibodies from bin C, antibodies from bin D, antibodies from bin E, antibodies from bin F, antibodies from bin G, antibodies from bin H or antibodies from bin I. Yet other preferred embodiments will comprise a reference antibody and any antibody that competes with the reference antibody.

[0028] The term “compete” or “competing antibody” when used in the context of the disclosed binding domains means binding competition between antibodies as determined by an assay in which a reference antibody or immunoreactive fragment thereof substantially prevents or inhibits (e.g., greater than 30%, 35%, 40%, 45%, 50%, 55%, 60%, 65%, 70%, 75%, 80%, 85% or 90%) specific binding of a test antibody to a common antigen. Compatible methods for determining such competition comprise art known techniques such as, for example, bio-layer interferometry, surface plasmon resonance, flow cytometry, competitive ELISA, etc.

[0029] In certain embodiments the invention is directed to a nucleic acid encoding the heavy or light chain amino acid sequence (or constructs or derivatives thereof) of any one of the anti-DLL3 binding domains disclosed herein. Compatible anti-DLL3 heavy and light chain variable region nucleic acid sequences are set forth in the appended sequence listing. In preferred embodiments the nucleic acid encoding the binding domain or CAR are incorporated in a plasmid or vector. In yet other embodiments the vector will comprise a viral vector.

[0030] In another embodiment the present invention provides methods of treating cancer such as, for example, pancreatic cancer, colorectal cancer, prostate cancer, small cell and non-small cell lung cancer, breast cancer, ovarian cancer and gastric cancer, comprising administering a pharmaceutical composition comprising a host cell expressing an anti-DLL3 CAR as disclosed herein.

[0031] In some embodiments, the invention provides methods of treating cancer comprising administering a pharmaceutical composition comprising a host cell expressing an anti-DLL3 CAR as disclosed herein and further comprising administering to the subject at least one additional therapeutic moiety. In preferred embodiments the host cell will comprise a sensitized lymphocyte.

[0032] The present invention further provides a method of reducing tumor initiating cells in a tumor cell population, wherein the method comprises contacting a tumor cell population comprising tumor initiating cells and tumor cells other than tumor initiating cells, with a host cell expressing an anti-DLL3 CAR; whereby the frequency of tumor initiating cells is reduced.

[0033] In yet other preferred embodiments the present invention also provides kits or devices and associated methods that are useful in the treatment of DLL3 associated disorders such as cancer. To this end the present invention preferably provides an article of manufacture useful for generating DLL3 sensitized lymphocytes for treating DLL3 associated disorders comprising, for example, a container or receptacle containing vectors (e.g., viral vectors) encoding the disclosed CARs and instructional materials for generating DLL3 sensitized lymphocytes. In selected embodiments the kits will comprise additional reagents and receptacles to effectively transduce the lymphocytes. In other selected embodiments such kits comprise allogeneic DLL3 sensitized lymphocytes that may be directly administered to the patient to generate the desired immune response. In still other embodiments such articles of manufacture will comprise a container or receptacle comprising a liquid formulation of DLL3 sensitized lymphocytes. In such embodiments the DLL3 sensitized lymphocytes may comprise allogenic or autologous host cells and in other embodiments the liquid formulation may comprise a pharmaceutically acceptable carrier.

[0034] The foregoing is a summary and thus contains, by necessity, simplifications, generalizations, and omissions of detail; consequently, those skilled in the art will appreciate that the summary is illustrative only and is not intended to be in any way limiting. Other aspects, features, and advantages of the methods, compositions and/or devices and/or other subject matter described herein will become apparent in the teachings set forth herein. The summary is provided to introduce a selection of concepts in a simplified form that are further described below in the Detailed Description. This summary is not intended to identify key features or essential features of the claimed subject matter, nor is it intended to be used as an aid in determining the scope of the claimed subject matter.

### BRIEF DESCRIPTION OF THE FIGURES

[0035] FIGS. 1A and 1B provide, in a tabular form, contiguous amino acid sequences (SEQ ID NOS: 21-407, odd numbers) of light and heavy chain variable regions of a number of murine and humanized exemplary DLL3 antibodies compatible with the disclosed DLL3 CARs as isolated, cloned and engineered as described in the Examples herein;

[0036] FIG. 2 depicts, in schematic form, the results of domain level mapping analysis of exemplary DLL3 antibodies isolated, cloned and engineered as described in the Examples herein;

[0037] FIG. 3 provides a schematic representation of an exemplary DLL3 CAR construct illustrating the various components thereof;

[0038] FIGS. 4A-4C provide nucleic acid sequences and amino acid sequences for three exemplary DLL3 CARs (SCT1-h16.15, SCT1-h16.13 and SCT1-h16.25 respectively) compatible with the instant invention;

[0039] FIG. 5 provides a schematic representation illustrating a process for producing DLL3 sensitized lymphocytes and their subsequent use to generate an immune response directed to DLL3 positive tumor cells;

[0040] FIGS. 6A and 6B demonstrate the expression of exemplary DLL3 CARs (SCT1-h16.13, SCT1-h16.15 and SCT1-h16.25) on transduced Jurkat cells (FIG. 6A) and the expression of hDLL3 on engineered HEK-293T control cells (FIG. 6B) each as measured using flow cytometry;

[0041] FIGS. 7A and 7B depict the induction of an immune response in SCT1-h16.15 transduced Jurkat cells at various ratios of lymphocyte to target cells as measured by IL-2 production (FIG. 7A) and the induction of an immune response (again as measured by IL2 levels) generated using three different exemplary DLL3 CAR cells at the same lymphocyte to target cell ratio (FIG. 7B);

[0042] FIG. 8 demonstrates that human primary lymphocytes may be engineered to effectively express exemplary anti-DLL3 CARs in accordance with the teachings herein;

[0043] FIGS. 9A and 9B provide DLL3 surface expression profiles for a 293T cell line engineered to express DLL3 (FIG. 9A) and a small cell lung cancer patient derived xenograft (“PDX”) cell line (FIG. 9B) as evidenced by flow cytometry;

[0044] FIG. 10 shows the ability of DLL3 sensitized primary lymphocytes comprising three different DLL3 CARs (SCT1-h16.13, SCT1-h16.15 and SCT1-h16.25) to eliminate engineered 293T cells expressing DLL3;

[0045] FIG. 11 demonstrates that primary human lymphocytes from two individuals may be engineered to effectively express an anti-DLL3 CAR in accordance with the teachings herein;

[0046] FIGS. 12A and 12B demonstrate the ability of DLL3 sensitized lymphocytes comprising host cells from two individuals to provoke an immune response (as measured by the induction of TNFα) when exposed to engineered 293T cells (FIG. 12A) or PDX tumor cells (FIG. 12B);

[0047] FIGS. 13A and 13B demonstrate the ability of DLL3 sensitized lymphocytes comprising host cells from two individuals to provoke an immune response (as measured by the induction of INFγ) when exposed to engineered 293T cells (FIG. 13A) or PDX tumor cells (FIG. 13B); and

[0048] FIGS. 14A and 14B show the ability of DLL3 sensitized lymphocytes comprising host cells from two individuals to eliminate engineered 293T cells (FIG. 14A) or PDX tumor cells (FIG. 14B) upon exposure.

### DETAILED DESCRIPTION OF THE INVENTION

[0049] The invention may be embodied in many different forms. Disclosed herein are non-limiting, illustrative embodiments of the invention that exemplify the principles thereof. Any section headings used herein are for organizational purposes only and are not to be construed as limiting the subject matter described. For the purposes of the instant disclosure all identifying sequence accession numbers may be found in the NCBI Reference Sequence (RefSeq) database and/or the NCBI GenBank® archival sequence database unless otherwise noted.

[0050] Recent advances in adoptive transfer immunotherapy have provided a promising approach for the treatment of various neoplasia and a chance to improve patient experiences, particularly with regard to solid tumors. In this regard the present invention is directed to the use of novel chimeric antigen receptors (“CARs”) comprising an extracellular binding or targeting domain that associates or reacts with delta-like ligand 3 (“DLL3”). As will be discussed extensively herein, DLL3 is a particularly effective tumor marker that is expressed on a number of different cancers and, significantly, has been found to be associated with cancer stem cells. Thus, when the anti-DLL3 binding domains of the instant invention are incorporated in a chimeric antigen receptor expressed on lymphocytes, the resulting “DLL3 sensitized lymphocytes” (e.g., natural killer cells or T cells that immunospecifically recognize a DLL3 determinant) are able to effectively mount an immune response directed to aberrant DLL3 positive cells including cancer stem cells. This ability to effectively eliminate tumorigenic “seed” cells is often critical in reducing the possibility of tumor recurrence or metastasis. To this end it will be appreciated that the anti-DLL3 CAR lymphocytes of the instant invention may be used in combination with other therapeutic agents (including anti-DLL3 antibody drug conjugates) or as part of a maintenance regimen following standard of care treatments.

[0051] More generally a chimeric antigen receptor is an artificially constructed hybrid protein or polypeptide containing or comprising an antigen binding domain of an antibody linked to a signaling domain (e.g., T-cell signaling or T-cell activation domains). The CARs of the instant invention have the ability to redirect the specificity and reactivity of sensitized lymphocytes (e.g., T-cells) toward DLL3 positive target cells in a non-MHC-restricted manner by exploiting the antigen-binding properties of monoclonal antibodies. The non-MHC-restricted antigen recognition gives T-cells expressing DLL3 CARs the ability to recognize tumorigenic DLL3 independent of antigen processing, thus bypassing a major mechanism of tumor escape. Moreover, when expressed in T-cells, CARs advantageously do not dimerize with endogenous T cell receptor (TCR) alpha and beta chains.

[0052] Accordingly, the present invention is generally directed to chimeric antigen receptors comprising a DLL3 binding domain that immunospecifically associates with DLL3 on target cells and stimulates an immune response. In preferred embodiments the DLL3 binding domain of the CAR may comprise a scFv derived from the heavy and light chain antibody variable regions disclosed herein. More specifically an “anti-DLL3 CAR” or simply “DLL3 CAR” of the instant invention shall comprise a chimeric protein incorporating an extracellular DLL3 binding domain, a transmembrane domain and an intracellular signaling domain (see FIG. 3). Typically a nucleotide sequence encoding the desired DLL3 CAR will be synthesized or engineered and inserted into an expression vector or system (e.g. lentiviral, retroviral, etc.). In preferred embodiments lymphocytes, including T-lymphocytes, natural killer cells (“NK cells”) and dendritic cells, obtained from a patient or donor are then exposed to (e.g., transduced) the selected DLL3 CAR vector to provide engineered lymphocytes that express the CAR protein with the extracellular DLL3 binding domain (i.e., “DLL3 sensitized lymphocytes”). Following optional expansion, these DLL3 sensitized lymphocytes may be infused into a patient to mount an immunospecific response to DLL3 positive tumor cells (see generally FIG. 5). In this regard the DLL3 sensitized lymphocytes will be activated upon contacting a target cell expressing a DLL3 determinant. To “activate the sensitized lymphocytes” (e.g., T cells and NK cells) means to induce a change in their biologic state by which the cells express activation markers, produce cytokines, proliferate and/or become cytotoxic to target cells. All these changes can be produced by primary stimulatory signals. Costimulatory signals amplify the magnitude of the primary signals and suppress cell death following initial stimulation resulting in a more durable activation state and thus a higher cytotoxic capacity.

[0053] Thus, it will further be appreciated that, besides the DLL3 binding domain, CARs of the invention will comprise an intracellular or cytoplasmic domain that initiates a primary cytoplasmic signaling sequence (e.g., a sequence for initiating antigen-dependent primary activation via a T-cell receptor complex). Compatible intracellular domains may, for example, be derived from CD3ζ, FcRγ, FcRβ, CD3γ, CD3δ, CD3ε, CD5, CD22, CD79a, CD79b, and CD66d. In other preferred embodiments, the CARs of the invention will comprise an intracellular domain that initiates a secondary or co-stimulating signal. Compatible costimulatory domains may comprise, for example, intracellular domains derived from CD2, CD4, CD5, CD8α, CD8β, CD28, CD134, CD137, ICOS, CD154, 4-1BB and glucocorticoid-induced tumor necrosis factor receptor (see U.S.P.N. US/2014/0242701). Additionally, in preferred embodiments the disclosed CARs will comprise a transmembrane (and optionally a spacer) domain interposed between the extracellular DLL3 binding domain and the intracellular signaling domain. As discussed in more detail below the transmembrane domain may comprise, for example, part of an antibody constant (Fc) region, human CD8a or artificially produced spacers known in the art. Essentially, any amino acid sequence that anchors the CAR in the cell membrane and allows for effective association of the DLL3 binding domain and transmission of appropriate signaling from the intracellular domain is compatible with the invention.

[0054] With respect to the novel DLL3 CARs of the invention, it will be appreciated that the selection of DLL3 as the tumor target is integral in generating an effective anti-tumor immune response. More specifically it has been found that DLL3 phenotypic determinants are clinically associated with various proliferative disorders, including neoplasia exhibiting neuroendocrine features, and that DLL3 protein and variants or isoforms thereof provide useful tumor markers which may be exploited in the treatment of related diseases. In this regard the present invention provides a number of chimeric antigen receptors that comprise an anti-DLL3 binding domain in addition to any signaling component. As discussed in more detail below, the disclosed DLL3 CARs are particularly effective at eliminating tumorigenic cells and therefore useful for the treatment and prophylaxis of certain proliferative disorders or the progression or recurrence thereof.

[0055] Moreover, as shown in the instant application it has been found that DLL3 markers or determinants such as cell surface DLL3 protein are therapeutically associated with cancer stem cells (also known as tumor perpetuating cells) and may be effectively leveraged to eliminate or silence the same. The ability to selectively reduce or eliminate cancer stem cells through the use of DLL3 CARs as disclosed herein is surprising in that such cells are known to generally be resistant to many conventional treatments. That is, the effectiveness of traditional, as well as more recent targeted treatment methods, is often limited by the existence and/or emergence of resistant cancer stem cells that are capable of perpetuating tumor growth even in face of diverse treatment methods. Further, determinants associated with cancer stem cells often make poor therapeutic targets due to low or inconsistent expression, failure to remain associated with the tumorigenic cell or failure to present at the cell surface. In sharp contrast to the teachings of the prior art, the instantly disclosed DLL3 CARs and associated methods effectively overcome this inherent resistance to specifically eliminate, deplete, silence or promote the differentiation of such cancer stem cells thereby negating their ability to sustain or, significantly, re-induce underlying tumor growth. Moreover, as expression of DLL3 protein has largely been associated with intracellular locations such as the Golgi, it was uncertain that such phenotypic determinants could be successfully exploited as a therapeutic target for the specific DLL3 CARs as taught herein.

[0056] Thus, it is particularly remarkable that DLL3 CARs such as those disclosed herein may advantageously be used in the treatment and/or prevention of selected proliferative (e.g., neoplastic) disorders or progression or recurrence thereof. It will be appreciated that, while preferred embodiments of the invention will be discussed extensively below, particularly in terms of exemplary signaling or costimulatory domains or regions or in the context of cancer stem cells or tumors comprising neuroendocrine features and their interactions with the disclosed DLL3 CARs, those skilled in the art will appreciate that the scope of the instant invention is not limited by such exemplary embodiments. Rather, the most expansive embodiments of the present invention and the appended claims are broadly and expressly directed to any chimeric antigen receptor comprising a binding domain that immunospecifically associates or binds to DLL3 and their use in the treatment and/or prevention of a variety of DLL3 associated or mediated disorders, including neoplastic or cell proliferative disorders, regardless of any particular mechanism of action, CAR construct or specifically targeted tumor, cellular or molecular component.

[0057] To that end, and as demonstrated in the instant application, it has unexpectedly been found that the disclosed DLL3 CARs can effectively be used to target and eliminate or otherwise incapacitate proliferative or tumorigenic cells and treat DLL3 associated disorders (e.g., neoplasia). As used herein a “DLL3 associated disorder” shall be held to mean any disorder or disease (including proliferative disorders) that is marked, diagnosed, detected or identified by a phenotypic aberration of DLL3 genetic components or expression (“DLL3 determinant”) during the course or etiology of the disease or disorder. In this regard a DLL3 phenotypic aberration or determinant may, for example, comprise elevated or depressed levels of DLL3 protein expression, abnormal DLL3 protein expression on certain definable cell populations or abnormal DLL3 protein expression at an inappropriate phase or stage of a cell lifecycle. Of course, it will be appreciated that similar expression patterns of genotypic determinants (e.g., mRNA transcription levels) of DLL3 may also be used to classify, detect or treat DLL3 disorders.

### I. DLL3 Physiology

[0058] It has been found that DLL3 phenotypic determinants are clinically associated with various proliferative disorders, including neoplasia exhibiting neuroendocrine features, and that DLL3 protein and variants or isoforms thereof provide useful tumor markers which may be exploited in the treatment of related diseases. In this regard the present invention provides a number of DLL3 CAR constructs comprising an engineered anti-DLL3 binding or targeting agent operably associated with one or more signaling domain(s) capable of inducing an immune response in a lymphocyte. As discussed in more detail below and set forth in the appended Examples, the disclosed anti-DLL3 CARs are particularly effective at eliminating tumorigenic cells and therefore useful for the treatment and prophylaxis of certain proliferative disorders or the progression or recurrence thereof.

[0059] Moreover, it has been found that DLL3 markers or determinants such as cell surface DLL3 protein are therapeutically associated with cancer stem cells (also known as tumor perpetuating cells) and may be effectively exploited to eliminate or silence the same. The ability to selectively reduce or eliminate cancer stem cells through the use of DLL3 CARs as disclosed herein is surprising in that such cells are known to generally be resistant to many conventional treatments. That is, the effectiveness of traditional, as well as more recent targeted treatment methods, is often limited by the existence and/or emergence of resistant cancer stem cells that are capable of perpetuating tumor growth even in face of these diverse treatment methods. Further, determinants associated with cancer stem cells often make poor therapeutic targets due to low or inconsistent expression, failure to remain associated with the tumorigenic cell or failure to present at the cell surface. In sharp contrast to the teachings of the prior art, the instantly disclosed CARs and methods effectively overcome this inherent resistance and to specifically eliminate, deplete, silence or promote the differentiation of such cancer stem cells thereby negating their ability to sustain or re-induce the underlying tumor growth.

[0060] In Drosophila, Notch signaling is mediated primarily by one Notch receptor gene and two ligand genes, known as Serrate and Delta (Wharton et al, 1985; Rebay et al., 1991). In humans, there are four known Notch receptors and five DSL (Delta-Serrate LAG2) ligands—two homologs of Serrate, known as Jagged1 and Jagged 2, and three homologs of Delta, termed delta-like ligands or DLL1, DLL3 and DLL4. In general, Notch receptors on the surface of the signal-receiving cell are activated by interactions with ligands expressed on the surface of an opposing, signal-sending cell (termed a trans-interaction). These trans-interactions lead to a sequence of protease mediated cleavages of the Notch receptor. In consequence, the Notch receptor intracellular domain is free to translocate from the membrane to the nucleus, where it partners with the CSL family of transcription factors (RBPJ in humans) and converts them from transcriptional repressors into activators of Notch responsive genes.

[0061] Of the human Notch ligands, DLL3 is different in that it seems incapable of activating the Notch receptor via trans-interactions (Ladi et al., 2005). Notch ligands may also interact with Notch receptors in cis (on the same cell) leading to inhibition of the Notch signal, although the exact mechanisms of cis-inhibition remain unclear and may vary depending upon the ligand (for instance, see Klein et al., 1997; Ladi et al., 2005; Glittenberg et al., 2006). Two hypothesized modes of inhibition include modulating Notch signaling at the cell surface by preventing trans-interactions, or by reducing the amount of Notch receptor on the surface of the cell by perturbing the processing of the receptor or by physically causing retention of the receptor in the endoplasmic reticulum or Golgi (Sakamoto et al., 2002; Dunwoodie, 2009). It is clear, however, that stochastic differences in expression of Notch receptors and ligands on neighboring cells can be amplified through both transcriptional and non-transcriptional processes, and subtle balances of cis- and trans-interactions can result in a fine tuning of the Notch mediated delineation of divergent cell fates in neighboring tissues (Sprinzak et al., 2010).

[0062] DLL3 is a member of the Delta-like family of Notch DSL ligands. Representative DLL3 protein orthologs include, but are not limited to, human (Accession Nos. NP_058637 and NP_982353), chimpanzee (Accession No. XP_003316395), mouse (Accession No. NP_031892), and rat (Accession No. NP_446118). In humans, the DLL3 gene consists of 8 exons spanning 9.5 kBp located on chromosome 19q13. Alternate splicing within the last exon gives rise to two processed transcripts, one of 2389 bases (Accession No. NM_016941) and one of 2052 bases (Accession No. NM_203486). The former transcript encodes a 618 amino acid protein (Accession No. NP_058637; SEQ ID NO: 1), whereas the latter encodes a 587 amino acid protein (Accession No. NP_982353; SEQ ID NO: 2). These two protein isoforms of DLL3 share overall 100% identity across their extracellular domains and their transmembrane domains, differing only in that the longer isoform contains an extended cytoplasmic tail containing 32 additional residues at the carboxy terminus of the protein. The biological relevance of the isoforms is unclear, although both isoforms can be detected in tumor cells.

[0063] As shown schematically in FIG. 2 the extracellular region of the DLL3 protein, comprises six EGF-like domains, the single DSL domain and the N-terminal domain. Generally, the EGF domains are recognized as occurring at about amino acid residues 216-249 (domain 1), 274-310 (domain 2), 312-351 (domain 3), 353-389 (domain 4), 391-427 (domain 5) and 429-465 (domain 6), with the DSL domain at about amino acid residues 176-215 and the N-terminal domain at about amino acid residues 27-175 of hDLL3 (SEQ ID NOS: 1 and 2). As discussed in more detail herein and shown in the Examples below, each of the EGF-like domains, the DSL domain and the N-terminal domain comprise part of the DLL3 protein as defined by a distinct amino acid sequence. Note that, for the purposes of the instant disclosure the respective EGF-like domains may be termed EGF1 to EGF6 with EGF1 being closest to the N-terminal portion of the protein. In regard to the structural composition of the protein one significant aspect of the instant invention is that the disclosed DLL3 modulators may be generated, fabricated, engineered or selected so as to react with a selected domain, motif or epitope. In certain cases such site-specific modulators may provide enhanced reactivity and/or efficacy depending on their primary mode of action. In particularly preferred embodiments the DLL3 CAR will bind to the DSL domain and, in even more preferred embodiments, will bind to an epitope comprising G203, R205, P206 (SEQ ID NO: 4) within the DSL domain.

### II. Cancer Stem Cells

[0064] As alluded to above it has surprisingly been discovered that aberrant DLL3 expression (genotypic and/or phenotypic) is associated with various tumorigenic cell subpopulations. In this respect the present invention provides DLL3 CAR mediated therapeutic regimens that may be particularly useful for targeting such cells (e.g., cancer stem cells), thereby facilitating the treatment, management or prevention of neoplastic disorders. Thus, in preferred embodiments the disclosed DLL3 CAR may be advantageously be used to reduce tumor initiating cell frequency in accordance with the present teachings and thereby facilitate the treatment or management of proliferative disorders.

[0065] According to the current models, a tumor comprises non-tumorigenic cells and tumorigenic cells. Non-tumorigenic cells do not have the capacity to self-renew and are incapable of reproducibly forming tumors, even when transplanted into immunocompromised mice in excess cell numbers. Tumorigenic cells, also referred to herein as “tumor initiating cells” (TICs), which make up 0.1-40% (more typically 0.1-10%) of a tumor's cell population, have the ability to form tumors. Tumorigenic cells encompass both tumor perpetuating cells (TPCs), referred to interchangeably as cancer stem cells (CSCs) and tumor progenitor cells (TProgs).

[0066] CSCs, like normal stem cells that support cellular hierarchies in normal tissue, are able to self-replicate indefinitely while maintaining the capacity for multilineage differentiation. CSCs are able to generate both tumorigenic progeny and non-tumorigenic progeny and are able to completely recapitulate the heterogeneous cellular composition of the parental tumor as demonstrated by serial isolation and transplantation of low numbers of isolated CSCs into immunocompromised mice.

[0067] Tprogs, like CSCs have the ability to fuel tumor growth in a primary transplant. However, unlike CSCs, they are not able to recapitulate the cellular heterogeneity of the parental tumor and are less efficient at reinitiating tumorigenesis in subsequent transplants because Tprogs are typically only capable of a finite number of cell divisions as demonstrated by serial transplantation of low numbers of highly purified Tprog into immunocompromised mice. Tprogs may further be divided into early Tprogs and late Tprogs, which may be distinguished by phenotype (e.g., cell surface markers) and their different capacities to recapitulate tumor cell architecture. While neither can recapitulate a tumor to the same extent as CSCs, early Tprogs have a greater capacity to recapitulate the parental tumor's characteristics than late Tprogs. Notwithstanding the foregoing distinctions, it has been shown that some Tprog populations can, on rare occasion, gain self-renewal capabilities normally attributed to CSCs and can themselves become CSCs.

[0068] CSCs exhibit higher tumorigenicity and are relatively more quiescent than: (i) Tprogs (both early and late Tprogs); and (ii) non-tumorigenic cells such as tumor-infiltrating cells, for example, fibroblasts/stroma, endothelial and hematopoietic cells that may be derived from CSCs and typically comprise the bulk of a tumor. Given that conventional therapies and regimens have, in large part, been designed to debulk tumors and attack rapidly proliferating cells, CSCs are more resistant to conventional therapies and regimens than the faster proliferating Tprogs and other bulk tumor cell populations such as non-tumorigenic cells. Other characteristics that may make CSCs relatively chemoresistant to conventional therapies are increased expression of multi-drug resistance transporters, enhanced DNA repair mechanisms and anti-apoptotic gene expression. These properties in CSCs constitute a key reason for the failure of standard oncology treatment regimens to ensure long-term benefit for most patients with advanced stage neoplasia because standard chemotherapy does not target the CSCs that actually fuel continued tumor growth and recurrence.

[0069] It has surprisingly been discovered that DLL3 expression is associated with various tumorigenic cell populations. The invention provides DLL3 CARs that may be particularly useful for targeting tumorigenic cells and may be used to silence, sensitize, neutralize, reduce the frequency, block, abrogate, interfere with, decrease, hinder, restrain, control, deplete, moderate, mediate, diminish, reprogram, eliminate, or otherwise inhibit (collectively, “inhibit”) tumorigenic cells, thereby facilitating the treatment, management and/or prevention of proliferative disorders (e.g. cancer). Advantageously, the novel DLL3 CARs of the invention may be selected so they preferably reduce the frequency or tumorigenicity of tumorigenic cells upon administration to a subject regardless of the form of the DLL3 determinant (e.g., isotype a or b). The reduction in tumorigenic cell frequency may occur as a result of (i) inhibition or eradication of tumorigenic cells; (ii) controlling the growth, expansion or recurrence of tumorigenic cells; (iii) interrupting the initiation, propagation, maintenance, or proliferation of tumorigenic cells; or (iv) by otherwise hindering the survival, regeneration and/or metastasis of the tumorigenic cells. In some embodiments, the inhibition of tumorigenic cells may occur as a result of a change in one or more physiological pathways. The change in the pathway, whether by inhibition of the tumorigenic cells, modification of their potential (for example, by induced differentiation or niche disruption) or otherwise interfering with the ability of tumorigenic cells to influence the tumor environment or other cells, allows for the more effective treatment of DLL3 associated disorders by inhibiting tumorigenesis, tumor maintenance and/or metastasis and recurrence.

[0070] Methods that can be used to assess the reduction in the frequency of tumorigenic cells, include but are not limited to, cytometric or immunohistochemical analysis, preferably by in vitro or in vivo limiting dilution analysis (Dylla et al. 2008, PMID: PMC2413402 and Hoey et al. 2009, PMID: 19664991).

[0071] Flow cytometry and immunohistochemistry may also be used to determine tumorigenic cell frequency. Both techniques employ one or more antibodies or reagents that bind art recognized cell surface proteins or markers known to enrich for tumorigenic cells (see WO 2012/031280). As known in the art, flow cytometry (e.g. florescence activated cell sorting (FACS)) can also be used to characterize, isolate, purify, enrich or sort for various cell populations including tumorigenic cells. Flow cytometry measures tumorigenic cell levels by passing a stream of fluid, in which a mixed population of cells is suspended, through an electronic detection apparatus which is able to measure the physical and/or chemical characteristics of up to thousands of particles per second. Immunohistochemistry provides additional information in that it enables visualization of tumorigenic cells in situ (e.g., in a tissue section) by staining the tissue sample with labeled antibodies or reagents which bind to tumorigenic cell markers.

[0072] Listed below are markers that have been associated with CSC populations and have been used to isolate or characterize CSCs: ABCA1, ABCA3, ABCG2, DLL3, ADCY9, ADORA2A, AFP, AXIN1, B7H3, BCL9, Bmi-1, BMP-4, C20orf52, C4.4A, carboxypeptidase M, CAV1, CAV2, CD105, CD133, CD14, CD16, CD166, CD16a, CD16b, CD2, CD20, CD24, CD29, CD3, CD31, CD324, CD325, CD3ζ, CD38, CD44, CD45, CD46, CD49b, CD49f, CD56, CD64, CD74, CD9, CD90, CEACAM6, CELSR1, CPD, CRIM1, CX3CL1, CXCR4, DAF, decorin, easyh1, easyh2, EDG3, eed, EGFR, ENPP1, EPCAM, EPHA1, EPHA2, FLJ10052, FLVCR, FZD1, FZD10, FZD2, FZD3, FZD4, FZD6, FZD7, FZD8, FZD9, GD2, GJA1, GLI1, GLI2, GPNMB, GPR54, GPRC5B, IL1R1, IL1RAP, JAM3, Lgr5, Lgr6, LRP3, LY6E, MCP, mf2, mllt3, MPZL1, MUC1, MUC16, MYC, N33, Nanog, NB84, nestin, NID2, NMA, NPC1, oncostatin M, OCT4, OPN3, PCDH7, PCDHA10, PCDHB2, PPAP2C, PTPN3, PTS, RARRES1, SEMA4B, SLC19A2, SLC1A1, SLC39A1, SLC4A11, SLC6A14, SLC7A8, smarcA3, smarcD3, smarcE1, smarcA5, Sox1, STAT3, STEAP, TCF4, TEM8, TGFBR3, TMEPAI, TMPRSS4, transferrin receptor, TrkA, WNT10B, WNT16, WNT2, WNT2B, WNT3, WNT5A, YY1 and 1-catenin. See, for example, Schulenburg et al., 2010, PMID: 20185329, U.S.P.N. 7,632,678 and U.S.P.N.s. 2007/0292414, 2008/0175870, 2010/0275280, 2010/0162416 and 2011/0020221.

[0073] Similarly, non-limiting examples of cell surface phenotypes associated with CSCs of certain tumor types include CD44^{hi}CD24^{low}, ALDH⁺, CD133⁺, CD123⁺, CD34⁺CD38⁻, CD44⁺CD24⁻, CD46^{hi}CD324⁺CD66c⁻, CD133⁺CD34⁺CD10⁻CD19⁻, CD138⁻CD34⁻CD19⁺, CD133⁺RC2⁺, CD44⁺α₂β₁^{hi}CD133⁺, CD44⁺CD24⁺ESA⁺, CD271⁺, ABCB5⁺ as well as other CSC surface phenotypes that are known in the art. See, for example, Schulenburg et al., 2010, supra, Visvader et al., 2008, PMID: 18784658 and U.S.P.N. 2008/0138313. Of particular interest with respect to the instant invention are CSC preparations comprising CD46^{hi}CD324⁺ phenotypes.

[0074] “Positive,” “low” and “negative” expression levels as they apply to markers or marker phenotypes are defined as follows. Cells with negative expression (i.e. “−”) are herein defined as those cells expressing less than, or equal to, the 95^{th} percentile of expression observed with an isotype control antibody in the channel of fluorescence in the presence of the complete antibody staining cocktail labeling for other proteins of interest in additional channels of fluorescence emission. Those skilled in the art will appreciate that this procedure for defining negative events is referred to as “fluorescence minus one”, or “FMO”, staining. Cells with expression greater than the 95^{th} percentile of expression observed with an isotype control antibody using the FMO staining procedure described above are herein defined as “positive” (i.e. “+”). As defined herein there are various populations of cells broadly defined as “positive.” A cell is defined as positive if the mean observed expression of the antigen is above the 95^{th} percentile determined using FMO staining with an isotype control antibody as described above. The positive cells may be termed cells with low expression (i.e. “lo”) if the mean observed expression is above the 95^{th} percentile determined by FMO staining and is within one standard deviation of the 95^{th} percentile. Alternatively, the positive cells may be termed cells with high expression (i.e. “hi”) if the mean observed expression is above the 95^{th} percentile determined by FMO staining and greater than one standard deviation above the 95^{th} percentile. In other embodiments the 99^{th} percentile may preferably be used as a demarcation point between negative and positive FMO staining and in particularly preferred embodiments the percentile may be greater than 99%.

[0075] The CD46^{hi}CD324⁺ marker phenotype and those exemplified immediately above may be used in conjunction with standard flow cytometric analysis and cell sorting techniques to characterize, isolate, purify or enrich TIC and/or TPC cells or cell populations for further analysis.

[0076] The ability of the CARs of the current invention to reduce the frequency of tumorigenic cells can therefore be determined using the techniques and markers described above. In some instances DLL3 CAR may reduce the frequency of tumorigenic cells by 10%, 15%, 20%, 25%, 30% or even by 35%. In other embodiments, the reduction in frequency of tumorigenic cells may be in the order of 40%0, 45%, 50%, 55%, 60% or 65%. In certain embodiments, the disclosed adoptive immunotherapy may reduce the frequency of tumorigenic cells by 70%, 75%, 80%, 85%, 90% or even 95%. It will be appreciated that any reduction of the frequency of tumorigenic cells is likely to result in a corresponding reduction in the tumorigenicity, persistence, recurrence and aggressiveness of the neoplasia.

### III. Chimeric Antigen Receptor Therapy

[0077] Cancer immunotherapies aim to harness the power of the human immune system to eradicate tumors via the activity of cytotoxic lymphocytes (comprising both cytotoxic T-lymphocytes and NK cells). That cytotoxic lymphocyte-mediated immune responses could lead to the eradication of residual tumor cells was inferred from studies that compared relapse rates in leukemia patients that had undergone various types of transplantation: a significant reduction in relapse rates was observed for patients receiving non-T-cell depleted marrow in allogeneic transplants from HLA identical siblings versus those receiving syngenic transplants, and this effect could be attributed to other T-cell mediated actions beyond graft-versus-host disease responses. However, clinically effective adoptive transfer of anti-tumor T-cells has been hampered by the fact that most tumor antigens are self-antigens, and therefore are poorly immunogenic. More specifically negative selection of T-cells bearing high-affinity T-cell receptors (TCRs) recognizing self-antigens takes place in the thymus during development, resulting in central tolerance and selection for T-cells having low-avidity recognition of the tumor/self-antigen. These lower avidity T-cells then have consequent weak activation of anti-tumor T-cell function and limited persistence. Genetically engineered cytotoxic lymphocytes are being deployed in two major approaches to circumvent this tolerance/low avidity block to strong anti-tumor T-cell activation. In the first approach, affinity-enhanced TCR recognizing tumor antigens are artificially introduced into T-cells using molecular genetic engineering techniques. This approach is limited by several factors, including difficulty in expressing the affinity-enhanced TCR at levels approaching wild-type TCR expression, the potential for mispairing of TCR chains which arises when introducing additional sets of TCR genes into a native T-cell, and the ability of tumor cells to evade MHC-restricted TCR recognition by down-regulating MHC molecules.

[0078] A second approach to the genetic engineering of cytotoxic lymphocytes is introduction of an artificial, non-MHC-restricted chimeric antigen receptor (CAR) into various lymphocyte populations. This is most typically achieved by harvesting bulk lymphocyte populations which are cultured, stimulated and expanded ex vivo prior to transduction with retroviral or lentiviral vectors encoding the CAR molecule. Like a native TCR, the CAR must possess the ability to specifically and selectively recognize a target antigen, and then upon binding to this antigen, transduce the appropriate signals to the lymphocyte to stimulate effector functions and/or the cytokine production necessary for a sustained anti-tumor immunological response. The concept of CAR-modified T-cells arose from studies in which it was observed that the cytoplasmic ITAM domain of the CD3ζ chain could activate T-cells when expressed independently from the TCR:CD3 protein complex, particularly when the CD3ζ ITAM domain was fused to a heterologous extracellular and transmembrane domain. A first-generation CD4-CD3ζ CAR was transduced into T-cells and tested in HIV patients. Follow up studies showed these engineered CAR-T cells persisted for up to a decade after infusion, indicative of some proliferation and persistence of the engineered cells. Subsequently, anti-tumor CARs were constructed by combining in a single recombinant molecule a scFv domain and a transmembrane domain with the cytoplasmic domain of the CD3ζ chain, and it could be shown the antigen recognition of these engineered CAR-T cells was redirected to reflect the specificity of the scFv (U.S.P.N. 7,446,179). These first generation scFv-directed CAR-T cells were capable of acting as non-MHC restricted cytotoxic lymphocytes, recognizing native tumor antigen rather than processed peptides, and promoting lysis of tumor cells expressing the native antigen.

[0079] While many of the first generation scFv-directed CAR-T cells showed expected effects in vitro, in vivo studies in cancer patients were disappointing for their lack of anti-tumor effects and lack of CAR-T persistence. As T-cell biology has become better understood, it has become clear that T-cell populations are comprised of short lived effector cells, longer-lived central and peripheral memory T-cells, as well as regulatory T-cells (Tregs) that interact with the other T-cell subpopulations. Central to function of these populations are the role of costimulatory signals in inducing persistent activation of resting naïve or memory T-cells via cytokine production, as well as the role co-stimulation provides in preventing anergy, a state of T-cell non-responsiveness that may potentially arise from exclusive TCR:CD3ζ signaling in the absence of costimulatory signals. In particular, various costimulatory signals from proteins such as CD28, OX40, CD27, CD137/4-1BB, CD2, CD3, CD11a/CD18, CD54 and CD58 may be beneficial for optimal levels of cytokine production, proliferation and clonal expansion, and induction of cytolytic activity. Of these, CD28 is perhaps the best understood costimulatory signal, and CD28 co-stimulation has been shown to augment cytokine release by antigen activated CAR-T cells. Similarly, costimulatory signaling through CD137/4-1BB has been shown to enhance native T-cell proliferation, and may contribute to longer persistence of CAR-T in vivo. Therefore, so called second generation CAR constructs have been designed in which various additional signaling domains from these molecules have been added in tandem to the CD3ζ domain (U.S.P.N.s. 5,686,281 and 8,399,645). So called third generation CAR molecules including three or more signaling domains (e.g., CD3ζ and two costimulatory signaling domains) are also reportedly under development.

[0080] Several second generation CAR-T cells directed to the CD19 antigen have been shown to have strong antitumor effects, as well as substantial persistence, in patients with hematological malignancies. To date, the effectiveness of CAR-T therapies with respect to the treatment of solid tumors remains to be conclusively demonstrated. With respect to the instant invention it has surprisingly been discovered that anti-DLL3 binding domains may be advantageously integrated with each of the aforementioned chimeric antigen receptors and adoptive immunotherapies to provide effective antineoplastic treatments that overcome some of the previous limitations.

### IV. Chimeric Antigen Receptors

[0081] As alluded to above the CARs of the instant invention generally comprise an extracellular domain comprising a DLL3 binding domain, a transmembrane domain and an intracellular signaling domain that activates certain lymphocytes and generates an immune response directed to DLL3 positive tumor cells. More generally, the disclosed chimeric antigen receptors comprise an ectodomain and an endodomain each as defined by the host cell wall. In this regard the terms “ectodomain” or “extracellular domain” will refer to the portion of the CAR polypeptide outside of the cell or exterior to the membranous lipid bilayer, which may comprise the antigen recognition (e.g., DLL3) binding domains, an optional hinge region, and any spacer domains exterior the to the amino acid residues physically spanning the membrane. Conversely the terms “endodomain” or “intracellular domain” will refer to the portion of the CAR polypeptide inside the cell or interior to the membranous lipid bilayer, which may comprise any spacer domains interior to the amino acid residues physically spanning the membrane, as well as the intracellular signaling domain.

[0082] A. DLL3 Binding Domains

[0083] 1. Binding Domain Structure

[0084] As discussed extensively throughout the instant disclosure, chimeric antigen receptors comprising an anti-DLL3 binding domain may advantageously be used to provide targeted therapies for various proliferative disorders. It will be appreciated that compatible anti-DLL3 binding domains may comprise anti-DLL3 antibodies or immunoreactive fragments or constructs or derivatives thereof. In certain embodiments intact antibodies or antibodies comprising at least some portion of the fc or constant domain comprise the DLL3 binding domain (see, for example, U.S.P.N. 2015/0139943). In other preferred embodiments, and as demonstrated in the Examples appended hereto, the anti-DLL3 binding domain may comprise a scFv derived from a monoclonal antibody (including humanized or CDR grafted monoclonal antibodies) that binds to DLL3. Compatible antibodies that may be used to provide DLL3 binding domains consistent with the instant invention are discussed in more detail immediately below. For the purposes of the instant application the terms “binding domain” and “antibody” may be used interchangeably unless otherwise contextually dictated.

[0085] Antibodies and variants and derivatives thereof, including accepted nomenclature and numbering systems, have been extensively described, for example, in Abbas et al. (2010), Cellular and Molecular Immunology (6^{th} Ed.), W.B. Saunders Company; or Murphey et al. (2011), Janeway's Immunobiology (8 Ed.), Garland Science.

[0086] An “intact antibody” typically comprises a Y-shaped tetrameric protein comprising two heavy (H) and two light (L) polypeptide chains held together by covalent disulfide bonds and non-covalent interactions. Each light chain is composed of one variable domain (VL) and one constant domain (CL). Each heavy chain comprises one variable domain (VH) and a constant region, which in the case of IgG, IgA, and IgD antibodies, comprises three domains termed CH1, CH2, and CH3 (IgM and IgE have a fourth domain, CH4). In IgG, IgA, and IgD classes the CH1 and CH2 domains are separated by a flexible hinge region, which is a proline and cysteine rich segment of variable length (from about 10 to about 60 amino acids in various IgG subclasses). The variable domains in both the light and heavy chains are joined to the constant domains by a “J” region of about 12 or more amino acids and the heavy chain also has a “D” region of about 10 additional amino acids. Each class of antibody further comprises inter-chain and intra-chain disulfide bonds formed by paired cysteine residues.

[0087] As alluded to above the term “antibody” should be construed generally and includes polyclonal antibodies, monoclonal antibodies, chimeric antibodies, humanized and primatized antibodies, CDR grafted antibodies, human antibodies, recombinantly produced antibodies, intrabodies, multispecific antibodies, bispecific antibodies, monovalent antibodies, multivalent antibodies, anti-idiotypic antibodies, synthetic antibodies, including muteins and variants thereof, immunospecific antibody fragments such as Fd, Fab, F(ab′)₂, F(ab′) fragments, single-chain fragments (e.g. scFv and ScFvFc); and derivatives thereof including Fc fusions and other modifications, and any other immunoreactive immunoglobulin molecule so long as it exhibits preferential association or binding with a DLL3 determinant. Moreover, unless dictated otherwise by contextual constraints the term further comprises all classes of antibodies (i.e. IgA, IgD, IgE, IgG, and IgM) and all subclasses (i.e., IgG1, IgG2, IgG3, IgG4, IgA1, and IgA2) and all immunoreactive fragments thereof. Heavy-chain constant domains that correspond to the different classes of antibodies are typically denoted by the corresponding lower case Greek letter α, δ, ε, γ, and μ, respectively. Light chains of the antibodies from any vertebrate species can be assigned to one of two clearly distinct types, called kappa (κ) and lambda (λ), based on the amino acid sequences of their constant domains. In short, any such antibody that binds to or associates with human DLL3 is compatible with the teachings herein and may be used as the binding domain component for the disclosed chimeric antigen receptors.

[0088] The variable domains of antibodies show considerable variation in amino acid composition from one antibody to another and are primarily responsible for antigen recognition and binding. Variable regions of each light/heavy chain pair form the antibody binding site such that an intact IgG antibody has two binding sites (i.e. it is bivalent). VH and VL domains comprise three regions of extreme variability, which are termed hypervariable regions, or more commonly, complementarity-determining regions (CDRs), framed and separated by four less variable regions known as framework regions (FRs). The non-covalent association between the VH and the VL region forms the Fv fragment (for “fragment variable”) which contains one of the two antigen-binding sites of an intact antibody. Of particular interest scFv constructs (for single chain fragment variable), which can be obtained by genetic engineering as discussed more extensively below, join VH and the VL regions (preferably from the same antibody), though a peptide linker. Depending on the desired conformation it will be appreciated that the peptide linker may be of various lengths.

[0089] As used herein, the assignment of amino acids to each domain, framework region and CDR may be in accordance with one of the numbering schemes provided by Kabat et al. (1991) Sequences of Proteins of Immunological Interest (5^{th} Ed.), US Dept. of Health and Human Services, PHS, NIH, NIH Publication no. 91-3242; Chothia et al., 1987, PMID: 3681981; Chothia et al., 1989, PMID: 2687698; MacCallum et al., 1996, PMID: 8876650; or Dubel, Ed. (2007) Handbook of Therapeutic Antibodies, 3^{rd} Ed., Wily-VCH Verlag GmbH and Co or AbM (Oxford Molecular/MSI Pharmacopia) unless otherwise noted. The amino acid residues which comprise CDRs as defined by Kabat, Chothia, MacCallum (also known as Contact) and AbM schemes, as obtained from the Abysis website database (infra.), are set out below.

TABLE 1

| | Kabat | Chothia | MacCallum | AbM |
|---|---|---|---|---|
| VH CDR1 | 31-35 | 26-32 | 30-35 | 26-35 |
| VH CDR2 | 50-65 | 52-56 | 47-58 | 50-58 |
| VH CDR3 | 95-102 | 95-102 | 93-101 | 95-102 |
| VL CDR1 | 24-34 | 24-34 | 30-36 | 24-34 |
| VL CDR2 | 50-56 | 50-56 | 46-55 | 50-56 |
| VL CDR3 | 89-97 | 89-97 | 89-96 | 89-97 |

[0090] Variable regions and CDRs in an antibody sequence can be identified according to general rules that have been developed in the art (as set out above, such as, for example, the Kabat numbering system) or by aligning the sequences against a database of known variable regions. Methods for identifying these regions are described in Kontermann and Dubel, eds., Antibody Engineering, Springer, New York, N.Y., 2001 and Dinarello et al., Current Protocols in Immunology, John Wiley and Sons Inc., Hoboken, N.J., 2000. Exemplary databases of antibody sequences are described in, and can be accessed through, the “Abysis” website at www.bioinf.org.uk/abs (maintained by A. C. Martin in the Department of Biochemistry & Molecular Biology University College London, London, England) and the VBASE2 website at www.vbase2.org, as described in Retter et al., Nucl. Acids Res., 33 (Database issue): D671-D674 (2005). Preferably antibody sequences are analyzed using the Abysis database, which integrates sequence data from Kabat, IMGT and the Protein Data Bank (PDB) with structural data from the PDB. See Dr. Andrew C. R. Martin's book chapter Protein Sequence and Structure Analysis of Antibody Variable Domains. In: Antibody Engineering Lab Manual (Ed.: Duebel, S. and Kontermann, R., Springer-Verlag, Heidelberg, ISBN-13: 978-3540413547, also available on the website bioinforg.uk/abs). The Abysis database website further includes general rules that have been developed for identifying CDRs which can be used in accordance with the teachings herein. Unless otherwise indicated, all CDRs set forth herein are derived according to the Abysis database website as per Kabat et al.

[0091] For heavy chain constant region amino acid positions discussed in the invention, numbering is according to the Eu index first described in Edelman et al., 1969, Proc. Natl. Acad. Sci. USA 63(1): 78-85 describing the amino acid sequence of myeloma protein Eu, which reportedly was the first human IgG1 sequenced. The EU index of Edelman is also set forth in Kabat et al., 1991 (supra.). Thus, the terms “EU index as set forth in Kabat” or “EU index of Kabat” or “EU index” in the context of the heavy chain refers to the residue numbering system based on the human IgG1 Eu antibody of Edelman et al. as set forth in Kabat et al., 1991 (supra.) The numbering system used for the light chain constant region amino acid sequence is similarly set forth in Kabat et al., (supra.) An exemplary kappa light chain constant region amino acid sequence compatible with the present invention is set forth immediately below:

(SEQ ID NO: 5)
RTVAAPSVFIFPPSDEQLKSGTASVVCLLNNFYPREAKVQWKVDNALQSG
NSQESVTEQDSKDSTYSLSSTLTLSKADYEKHKVYACEVTHQGLSSPVTK
SFNRGEC.

[0092] Similarly, an exemplary IgG1 heavy chain constant region amino acid sequence compatible with the present invention is set forth immediately below:

(SEQ ID NO: 6)
ASTKGPSVFPLAPSSKSTSGGTAALGCLVKDYFPEPVTVSWNSGALTSGV
HTFPAVLQSSGLYSLSSVVTVPSSSLGTQTYICNVNHKPSNTKVDKKVEP
KSCDKTHTCPPCPAPELLGGPSVFLFPPKPKDTLMISRTPEVTCVVVDVS
HEDPEVKFNWYVDGVEVHNAKTKPREEQYNSTYRVVSVLTVLHQDWLNGK
EYKCKVSNKALPAPIEKTISKAKGQPREPQVYTLPPSRDELTKNQVSLTC
LVKGFYPSDIAVEWESNGQPENNYKTTPPVLDSDGSFFLYSKLTVDKSRW
QQGNVFSCSVMHEALHNHYTQKSLSLSPG.

[0093] The disclosed constant region sequences, or variations or derivatives thereof, may be operably associated with the disclosed heavy and light chain variable regions using standard molecular biology techniques to provide antibodies (full length or immunoreactive fragments comprising partial fc regions) that may be used as such or incorporated in DLL3 CARs of the invention (preferably as part of the transmembrane domain).

[0094] More generally, the anti-DLL3 binding domain component of compatible CARs may be generated from any antibody that specifically recognizes or associates with a DLL3 determinant. As used herein “determinant” or “target” means any detectable trait, property, marker or factor that is identifiably associated with, or specifically found in or on a particular cell, cell population or tissue. Determinants or targets may be morphological, functional or biochemical in nature and are preferably phenotypic. In certain preferred embodiments a determinant is a protein that is differentially expressed (over- or under-expressed) by specific cell types or by cells under certain conditions (e.g., during specific points of the cell cycle or cells in a particular niche). For the purposes of the instant invention a determinant preferably is differentially expressed on aberrant cancer cells and may comprise a DLL3 protein, or any of its splice variants, isoforms, homologs or family members, or specific domains, regions or epitopes thereof. An “antigen”, “immunogenic determinant”, “antigenic determinant” or “immunogen” means any protein or any fragment, region or domain thereof that can stimulate an immune response when introduced into an immunocompetent animal and is recognized by the antibodies produced from the immune response. The presence or absence of the DLL3 determinants contemplated herein may be used to identify a cell, cell subpopulation or tissue (e.g., tumors, tumorigenic cells or CSCs).

[0095] 2. Antibody Generation and Production

[0096] Antibodies compatible with the invention can be produced using a variety of methods known in the art and any such antibodies may be further modified to provide the binding domain of the anti-DLL3 chimeric antigen receptors of the instant invention.

[0097] a. Generation of Polyclonal Antibodies in Host Animals

[0098] The production of polyclonal antibodies in various host animals is well known in the art (see for example, Harlow and Lane (Eds.) (1988) Antibodies: A Laboratory Manual, CSH Press; and Harlow et al. (1989) Antibodies, NY, Cold Spring Harbor Press). In order to generate polyclonal antibodies, an immunocompetent animal (e.g., mouse, rat, rabbit, goat, non-human primate, etc.) is immunized with an antigenic protein or cells or preparations comprising an antigenic protein. After a period of time, polyclonal antibody-containing serum is obtained by bleeding or sacrificing the animal. The serum may be used in the form obtained from the animal or the antibodies may be partially or fully purified to provide immunoglobulin fractions or isolated antibody preparations.

[0099] Any form of antigen, or cells or preparations containing the antigen, can be used to generate an antibody that is specific for a determinant. The term “antigen” is used in a broad sense and may comprise any immunogenic fragment or determinant of the selected target including a single epitope, multiple epitopes, single or multiple domains or the entire extracellular domain (ECD). The antigen may be an isolated full-length protein, a cell surface protein (e.g., immunizing with cells expressing at least a portion of the antigen on their surface), or a soluble protein (e.g., immunizing with only the ECD portion of the protein). The antigen may be produced in a genetically modified cell. Any of the aforementioned antigens may be used alone or in combination with one or more immunogenicity enhancing adjuvants known in the art. The DNA encoding the antigen may be genomic or non-genomic (e.g., cDNA) and may encode at least a portion of the ECD, sufficient to elicit an immunogenic response. Any vectors may be employed to transform the cells in which the antigen is expressed, including but not limited to adenoviral vectors, lentiviral vectors, plasmids, and non-viral vectors, such as cationic lipids.

[0100] b. Monoclonal Antibodies

[0101] In selected embodiments, the invention contemplates use of monoclonal antibodies. The term “monoclonal antibody” or “mAb” refers to an antibody obtained from a population of substantially homogeneous antibodies, i.e., the individual antibodies comprising the population are identical except for possible mutations (e.g., naturally occurring mutations), that may be present in minor amounts.

[0102] Monoclonal antibodies can be prepared using a wide variety of techniques including hybridoma techniques, recombinant techniques, phage display technologies, transgenic animals (e.g., a XenoMouse®) or some combination thereof. For example, in preferred embodiments monoclonal antibodies can be produced using hybridoma and biochemical and genetic engineering techniques such as described in more detail in An, Zhigiang (ed.) Therapeutic Monoclonal Antibodies: From Bench to Clinic, John Wiley and Sons, 1^{st} ed. 2009; Shire et. al. (eds.) Current Trends in Monoclonal Antibody Development and Manufacturing, Springer Science+Business Media LLC, 1^{st} ed. 2010; Harlow et al., Antibodies: A Laboratory Manual, Cold Spring Harbor Laboratory Press, 2nd ed. 1988; Hammerling, et al., in: Monoclonal Antibodies and T-Cell Hybridomas 563-681 (Elsevier, N.Y., 1981). Following generation of a number of monoclonal antibodies that bind specifically to a determinant, particularly suitable antibodies may be selected through various screening processes, based on, for example, affinity for the determinant or rate of internalization. In particularly preferred embodiments monoclonal antibodies produced as described herein may be used as “source” antibodies and further modified to provide effective DLL3 binding domains that may be associated with the disclosed CARs. For example the source antibody may be manipulated to provide scFvs or other fragments, improve affinity for the target, improve its production in cell culture, reduce immunogenicity in vivo, create multispecific constructs, etc. A more detailed description of monoclonal antibody production and screening is set out below and in the appended Examples.

[0103] c. Human Antibodies

[0104] Antibodies compatible with the instant invention may comprise fully human antibodies. The term “human antibody” refers to an antibody (preferably a monoclonal antibody) which possesses an amino acid sequence that corresponds to that of an antibody produced by a human and/or has been made using any of the techniques for making human antibodies described below.

[0105] In one embodiment, recombinant human antibodies may be isolated by screening a recombinant combinatorial antibody library prepared using phage display. In one embodiment, the library is a scFv phage or yeast display library, generated using human VL and VH cDNAs prepared from mRNA isolated from B-cells.

[0106] Human antibodies can also be made by introducing human immunoglobulin loci into transgenic animals, e.g., mice in which the endogenous immunoglobulin genes have been partially or completely inactivated and human immunoglobulin genes have been introduced. Upon challenge antibody generation is observed which closely resembles that seen in humans in all respects, including gene rearrangement, assembly and fully human antibody repertoire. This approach is described, for example, in U.S.P.Ns. 5,545,807; 5,545,806; 5,569,825; 5,625,126; 5,633,425; 5,661,016, and U.S.P.Ns. 6,075,181 and 6,150,584 regarding XenoMouse® technology; and Lonberg and Huszar, 1995, PMID: 7494109). Alternatively, a human antibody may be prepared via immortalization of human B lymphocytes producing an antibody directed against a target antigen (such B lymphocytes may be recovered from an individual suffering from a neoplastic disorder or may have been immunized in vitro). See, e.g., Cole et al., Monoclonal Antibodies and Cancer Therapy, Alan R. Liss, p. 77 (1985); Boerner et al., 1991, PMID: 2051030; and U.S.P.N. 5,750,373. As with other monoclonal antibodies such human antibodies may be used as source antibodies.

[0107] d. Antibody Production and Engineering

[0108] Antibodies and fragments thereof may be produced or modified using genetic material obtained from antibody producing cells and recombinant technology (see, for example, Berger and Kimmel, Guide to Molecular Cloning Techniques, Methods in Enzymology vol. 152 Academic Press, Inc., San Diego, Calif.; Sambrook and Russell (Eds.) (2000) Molecular Cloning: A Laboratory Manual (3^{rd} Ed.), NY, Cold Spring Harbor Laboratory Press; Ausubel et al. (2002) Short Protocols in Molecular Biology: A Compendium of Methods from Current Protocols in Molecular Biology, Wiley, John & Sons, Inc.; and U.S.P.N. 7,709,611).

[0109] As will be discussed in more detail below another aspect of the invention pertains to nucleic acid molecules that encode the DLL3 binding domains and CARs of the invention. The nucleic acids may be present in whole cells, in a cell lysate, or in a partially purified or substantially pure form. A nucleic acid is “isolated” or rendered substantially pure when separated from other cellular components or other contaminants, e.g., other cellular nucleic acids or proteins, by standard techniques, including alkaline/SDS treatment, CsCl banding, column chromatography, agarose gel electrophoresis and others well known in the art. A nucleic acid of the invention can be, for example, DNA (e.g. genomic DNA, cDNA), RNA and artificial variants thereof (e.g., peptide nucleic acids), whether single-stranded or double-stranded or RNA, RNA and may or may not contain introns. In a preferred embodiment, the nucleic acid is a cDNA molecule.

[0110] Nucleic acids of the invention can be obtained and manipulated using standard molecular biology techniques. For antibodies expressed by hybridomas (e.g., hybridomas prepared as set forth in the Examples below), cDNAs encoding the light and heavy chains of the antibody can be obtained by standard PCR amplification or cDNA cloning techniques. For antibodies obtained from an immunoglobulin gene library (e.g., using phage display techniques), nucleic acid encoding the antibody can be recovered from the library.

[0111] DNA fragments encoding VH and VL segments can be further manipulated by standard recombinant DNA techniques, for example to convert the variable region genes to full-length antibody chain genes, to Fab fragment genes or preferably to a nucleotide sequence encoding a DLL3 specific scFv. In these manipulations, a VL- or VH-encoding DNA fragment is operatively linked to another DNA fragment encoding another protein, such as an antibody constant region or a flexible linker. The term “operatively linked” or “operably linked”, as used in this context, means that the two DNA fragments are joined such that the amino acid sequences encoded by the two DNA fragments remain in-frame.

[0112] The isolated DNA encoding the VH region can be converted to a full-length heavy chain gene by operatively linking the VH-encoding DNA to another DNA molecule encoding heavy chain constant regions (CH1, CH2 and CH3). The sequences of human heavy chain constant region genes are known in the art (see e.g., Kabat, et al. (1991) (supra)) and DNA fragments encompassing these regions can be obtained by standard PCR amplification. The heavy chain constant region can be an IgG1, IgG2, IgG3, IgG4, IgA, IgE, IgM or IgD constant region, but most preferably is an IgG1 or IgG4 constant region. An exemplary IgG1 constant region is set forth in SEQ ID NO: 6. For a Fab fragment heavy chain gene, the VH-encoding DNA can be operatively linked to another DNA molecule encoding only the heavy chain CH1 constant region.

[0113] The isolated DNA encoding the VL region can be converted to a full-length light chain gene (as well as a Fab light chain gene) by operatively linking the VL-encoding DNA to another DNA molecule encoding the light chain constant region, CL. The sequences of human light chain constant region genes are known in the art (see e.g., Kabat, et al. (1991) (supra)) and DNA fragments encompassing these regions can be obtained by standard PCR amplification. The light chain constant region can be a kappa or lambda constant region, but most preferably is a kappa constant region. In this respect an exemplary compatible kappa light chain constant region is set forth in SEQ ID NO: 5.

[0114] Contemplated herein are certain polypeptides (e.g. antibody variable regions) that exhibit “sequence identity”, sequence similarity” or “sequence homology” to the polypeptides of the invention. A “homologous” polypeptide may exhibit 65%, 70%, 75%, 80%, 85%, or 90% sequence identity. In other embodiments a “homologous” polypeptides may exhibit 93%, 95% or 98% sequence identity. As used herein, the percent homology between two amino acid sequences is equivalent to the percent identity between the two sequences. The percent identity between the two sequences is a function of the number of identical positions shared by the sequences (i.e., % homology=# of identical positions/total # of positions×100), taking into account the number of gaps, and the length of each gap, which need to be introduced for optimal alignment of the two sequences. The comparison of sequences and determination of percent identity between two sequences can be accomplished using a mathematical algorithm, as described in the non-limiting examples below.

[0115] The percent identity between two amino acid sequences can be determined using the algorithm of E. Meyers and W. Miller (Comput. Appl. Biosci., 4:11-17 (1988)) which has been incorporated into the ALIGN program (version 2.0), using a PAM120 weight residue table, a gap length penalty of 12 and a gap penalty of 4. In addition, the percent identity between two amino acid sequences can be determined using the Needleman and Wunsch (J. Mol. Biol. 48:444-453 (1970)) algorithm which has been incorporated into the GAP program in the GCG software package (available at www.gcg.com), using either a Blossum 62 matrix or a PAM250 matrix, and a gap weight of 16, 14, 12, 10, 8, 6, or 4 and a length weight of 1, 2, 3, 4, 5, or 6.

[0116] Additionally or alternatively, the protein sequences of the present invention can further be used as a “query sequence” to perform a search against public databases to, for example, identify related sequences. Such searches can be performed using the XBLAST program (version 2.0) of Altschul, et al. (1990) J. Mol. Biol. 215:403-10. BLAST protein searches can be performed with the XBLAST program, score=50, wordlength=3 to obtain amino acid sequences homologous to the antibody molecules of the invention. To obtain gapped alignments for comparison purposes, Gapped BLAST can be utilized as described in Altschul et al., (1997) Nucleic Acids Res. 25(17):3389-3402. When utilizing BLAST and Gapped BLAST programs, the default parameters of the respective programs (e.g., XBLAST and NBLAST) can be used.

[0117] Residue positions which are not identical may differ by conservative amino acid substitutions or by non-conservative amino acid substitutions. A “conservative amino acid substitution” is one in which an amino acid residue is substituted by another amino acid residue having a side chain with similar chemical properties (e.g., charge or hydrophobicity). In general, a conservative amino acid substitution will not substantially change the functional properties of a protein. In cases where two or more amino acid sequences differ from each other by conservative substitutions, the percent sequence identity or degree of similarity may be adjusted upwards to correct for the conservative nature of the substitution. In cases where there is a substitution with a non-conservative amino acid, in preferred embodiments the polypeptide exhibiting sequence identity will retain the desired function or activity of the polypeptide of the invention (e.g., antibody.)

[0118] Also contemplated herein are nucleic acids that that exhibit “sequence identity”, sequence similarity” or “sequence homology” to the nucleic acids of the invention. A “homologous sequence” means a sequence of nucleic acid molecules exhibiting at least about 65%, 70%, 75%, 80%, 85%, or 90% sequence identity. In other embodiments, a “homologous sequence” of nucleic acids may exhibit 93%, 95% or 98% sequence identity to the reference nucleic acid cells or CSCs).

[0119] 3. Derived Antibodies as DLL3 Binding Domains

[0120] Once the source antibodies have been generated, selected and isolated as described above, they may be further altered to provide anti-DLL3 CAR binding domain components compatible with the teachings herein. Preferably the source antibodies are modified or altered using known molecular engineering techniques to provide derived binding domain components having the desired therapeutic properties.

[0121] a. Chimeric and Humanized Antibodies

[0122] As discussed above selected embodiments of the invention comprise murine monoclonal antibodies that immunospecifically bind to DLL3 and, for the purposes of the instant disclosure, may be considered “source” antibodies for DLL3 binding domains. In selected embodiments, DLL3 binding domains compatible with the invention can be derived from such source antibodies through optional modification of the constant region and/or the antigen binding amino acid sequences of the source antibody. In certain embodiments an antibody is derived from a source antibody if selected amino acids in the source antibody are altered through deletion, mutation, substitution, integration or combination. In another embodiment, a “derived” antibody is one in which fragments of the source antibody (e.g., one or more CDRs or the entire heavy and light chain variable regions) are combined with or incorporated into an acceptor binding domain construct to provide the derivative DLL3 binding domain (e.g. chimeric or humanized binding domains). These derived binding domains can be generated using standard molecular biological techniques as described below, such as, for example, to provide an scFv; to improve affinity for the determinant; to improve antibody stability; to improve expression; to reduce immunogenicity in vivo; to reduce toxicity or to facilitate transmission of a signal. Such antibodies may also be derived from source antibodies through modification of the mature molecule (e.g., glycosylation patterns or pegylation) by chemical means or post-translational modification.

[0123] In one embodiment, the chimeric binding regions of the invention are derived from protein segments from at least two different species or class of antibodies that have been covalently joined. The term “chimeric” antibody is directed to constructs in which a portion of the heavy and/or light chain is identical or homologous to corresponding sequences in antibodies from a particular species or belonging to a particular antibody class or subclass, while the remainder of the chain(s) is identical or homologous to corresponding sequences in antibodies from another species or belonging to another antibody class or subclass, as well as fragments of such antibodies (U.S. P.N. 4,816,567; Morrison et al., 1984, PMID: 6436822). In some preferred embodiments chimeric antibodies of the instant invention may comprise all or most of the selected murine heavy and light chain variable regions operably linked to all or part of human light and heavy chain constant regions. In other particularly preferred embodiments, DLL3 binding domains may be “derived” from the mouse antibodies disclosed herein.

[0124] In other embodiments, the chimeric binding domains of the invention are “CDR grafted” where the CDRs (as defined using Kabat, Chothia, McCallum, etc.) are derived from a particular species or belonging to a particular antibody class or subclass, while the remainder of the binding region is derived from an antibody from another species or belonging to another antibody class or subclass. For use in humans, one or more selected rodent CDRs (e.g., mouse CDRs) may be grafted into a human acceptor binding domain (i.e., with human framework regions), replacing one or more of the naturally occurring CDRs of the human antibody. These constructs generally have the advantages of providing effective binding while reducing unwanted immune responses to the binding domain by the subject. In particularly preferred embodiments the CDR grafted binding domains will comprise one or more CDRs obtained from a mouse incorporated in a human framework sequence.

[0125] Similar to the CDR-grafted binding domain is a “humanized” binding domain. As used herein, a “humanized” binding domain is a human binding domain (acceptor domain generally comprising human framework regions) comprising one or more amino acid sequences (e.g. CDR sequences) derived from one or more non-human antibodies (a donor or source antibody). In certain embodiments, “back mutations” can be introduced into the humanized binding domain, in which residues in one or more FRs of the variable region of the recipient human binding domain are replaced by corresponding residues from the non-human species donor antibody. Such back mutations may to help maintain the appropriate three-dimensional configuration of the grafted CDR(s) and thereby improve affinity and binding domain stability. Antibodies from various donor species may be used including, without limitation, mouse, rat, rabbit, or non-human primate. Furthermore, humanized antibodies or fragments may comprise new residues that are not found in the recipient antibody or in the donor antibody to, for example, further refine antibody performance. CDR grafted and humanized antibodies (and related DLL3 binding domains) compatible with the instant invention and comprising the source murine antibodies set forth in the Examples below may therefor readily be provided without undue experimentation using the prior art techniques as set forth herein.

[0126] Various art-recognized techniques can further be used to determine which human sequences to use as acceptor antibodies to provide humanized constructs in accordance with the instant invention. Compilations of compatible human germline sequences and methods of determining their suitability as acceptor sequences are disclosed, for example, in Tomlinson, I. A. et al. (1992) J. Mol. Biol. 227:776-798; Cook, G. P. et al. (1995) Immunol. Today 16: 237-242; Chothia, D. et al. (1992) J. Mol. Biol. 227:799-817; and Tomlinson et al. (1995) EMBO J 14:4628-4638 each of which is incorporated herein in its entirety. The V-BASE directory (VBASE2—Retter et al., Nucleic Acid Res. 33; 671-674, 2005) which provides a comprehensive directory of human immunoglobulin variable region sequences (compiled by Tomlinson, I. A. et al. MRC Centre for Protein Engineering, Cambridge, UK) may also be used to identify compatible acceptor sequences. Additionally, consensus human framework sequences described, for example, in U.S.P.N. 6,300,064 may also prove to be compatible acceptor sequences are can be used in accordance with the instant teachings. In general, human framework acceptor sequences are selected based on homology with the murine source framework sequences along with an analysis of the CDR canonical structures of the source and acceptor antibodies. The derived sequences of the heavy and light chain variable regions of the derived antibody (or binding domain) may then be synthesized using art recognized techniques.

[0127] By way of example CDR grafted and humanized antibodies, and associated methods, are described in U.S.P.Ns. 6,180,370 and 5,693,762. For further details, see, e.g., Jones et al., 1986, PMID: 3713831); and U.S.P.Ns. 6,982,321 and 7,087,409.

[0128] The sequence identity or homology of the CDR grafted or humanized antibody variable region to the human acceptor variable region may be determined as discussed herein and, when measured as such, will preferably share at least 60% or 65% sequence identity, more preferably at least 70%, 75%, 80%, 85%, or 90% sequence identity, even more preferably at least 93%, 95%, 98% or 99% sequence identity. Preferably, residue positions which are not identical differ by conservative amino acid substitutions. A “conservative amino acid substitution” is one in which an amino acid residue is substituted by another amino acid residue having a side chain (R group) with similar chemical properties (e.g., charge or hydrophobicity). In general, a conservative amino acid substitution will not substantially change the functional properties of a protein. In cases where two or more amino acid sequences differ from each other by conservative substitutions, the percent sequence identity or degree of similarity may be adjusted upwards to correct for the conservative nature of the substitution.

[0129] It will be appreciated that the annotated CDRs and framework sequences as provided in the appended FIGS. 1A and 1B are defined as per Kabat et al. using a proprietary Abysis database. However, as discussed herein one skilled in the art could readily identify CDRs in accordance with definitions provided by Chothia et al., ABM or MacCallum et al as well as Kabat et al. As such, anti-DLL3 humanized antibodies comprising one or more CDRs derived according to any of the aforementioned systems are explicitly held to be within the scope of the instant invention.

[0130] b. Antibody Fragments, Derivatives or Constructs

[0131] In particularly preferred embodiments the DLL3 binding domain will comprise an antibody fragment, derivative or construct. More particularly, regardless of which form of antibody (e.g. chimeric, humanized, etc.) is selected to practice the invention it will be appreciated that immunoreactive fragments of the same may be used, as part of a DLL3 CAR, in accordance with the teachings herein. In a broad sense an “antibody fragment” comprises at least an immunoreactive portion of an intact antibody. That is, as used herein, the term “antibody fragment” includes at least an antigen-binding fragment or portion of an intact antibody and the term “antigen-binding fragment” refers to a polypeptide fragment of an immunoglobulin or antibody that immunospecifically binds or reacts with an immunogenic determinant of DLL3 or competes with the intact antibody from which the fragments were derived for specific antigen binding. Moreover, for the purposes of the instant invention an “antibody construct” or “antibody derivative” shall be held to mean any molecular structure comprising an antibody fragment. Preferably such derivatives or constructs shall be non-natural and will be fabricated to impart beneficial molecular properties while maintaining the immunoreactive (or immunospecific) nature of the antibody.

[0132] Exemplary compatible antibody fragments, constructs or derivatives include: variable light chain fragments (VL), variable heavy chain fragments (VH), scFv, F(ab′)2 fragment, Fab fragment, Fd fragment, Fv fragment, single domain antibody fragments, diabodies, linear antibodies, single-chain antibody molecules and multispecific antibodies formed or derived from antibody fragments. In other embodiments the DLL3 binding domain of the instant invention may comprise an intact antibody, a scFv-Fc construct, a minibody, a diabody, a scFv construct, a Fab-scFv2 construct, a Fab-scFv construct or a peptibody. In certain aspects the DLL3 binding domain will be covalently linked (e.g., by using art-recognized genetic engineering techniques) to the transmembrane and intracellular domains of the CAR. In other embodiments the DLL3 binding domain may be non-covalently linked (e.g., via an Fc portion of the binding domain as set forth in U.S.P.N. 2015/0139943) to the transmembrane and intracellular domains of the CAR. Each form of binding domain attachment is compatible with the instant invention as long as the sensitized lymphocytes are able to induce the desired immune response.

[0133] In particularly preferred embodiments, and as shown in the appended Examples, the DLL3 binding domain will comprise a scFv construct. As used herein, a “single chain variable fragment (scFv)” means a single chain polypeptide derived from an antibody which retains the ability to bind to an antigen. An example of the scFv includes an antibody polypeptide which is formed by a recombinant DNA technique and in which Fv regions of immunoglobulin heavy chain and light chain fragments are linked via a spacer sequence. Various methods for preparing an scFv are known, and include methods described in U.S.P.N. 4,694,778.

[0134] In other embodiments, the DLL3 binding domain is one that comprises an Fc region and that retains at least one of the biological functions normally associated with the Fc region when present in an intact antibody, such as FcRn binding, antibody half-life modulation, ADCC function and complement binding. In one embodiment, an antibody fragment is a monovalent antibody that has an in vivo half-life substantially similar to an intact antibody. For example, such a binding domain may comprise an immunoreactive region linked to an Fc sequence comprising at least one free cysteine capable of conferring in vivo stability to the fragment. In other embodiments the Fc region may be modified using art-recognized techniques to modify the pharmacokinetics or pharmacodynamics of the disclosed CARs and sensitized lymphocytes.

[0135] Where the DLL3 binding domain comprises an Fc portion it may be non-covalently linked or joined with the remaining portions of the CAR via an extracellular Fc receptor or binding molecule (“Fc binder”) that is operably associated with the transmembrane and intracellular domains. As used herein the term “Fc binder” is held to mean any molecule or portion thereof that binds to, or associates with, the Fc portion of an antibody (e.g., an Fc receptor). Such constructs (i.e., a “proto-CAR” comprising an Fc binder, transmembrane domain and intracellular signaling domain) may be fabricated using standard molecular biology techniques and associated with the selected lymphocytes (autologous or allogeneic) as described herein (e.g., via transduction) to generate “primed lymphocytes”. At some point prior to introduction into the patient, the primed lymphocytes may then be exposed to selected DLL3 binding domain(s) comprising at least an Fc portion under conditions that allow association of the DLL3 binding domain(s) with the proto-CAR. The non-covalent association of the binding domain with the proto-CAR provide the DLL3 sensitized lymphocytes of the instant invention and may be used to inhibit tumorigenic cell proliferation as described herein (see generally U.S.P.N. 2015/0139943 which is incorporated herein in its entirety).

[0136] In those embodiments comprising a proto-CAR the Fc binder may comprise an Fc receptor such as an Fc-gamma receptor, an Fc-alpha receptor or an Fc-epsilon receptor. In certain selected embodiments the Fc receptor may comprise the ligand binding domain of CD16 (e.g., CD16A or CD16B), CD32 (e.g., CD32A or CD32B) or CD64 (e.g., CD64A, CD64B or CD64C). In certain other embodiments the Fc binder will not be an Fc receptor. For example the Fc binder may comprise all or part of protein A or protein G as long as the proto-CAR has the ability to associate with the DLL3 binding domain. In other embodiments the Fc binder may comprise an immunoreactive antibody or fragment or construct or derivative thereof that binds the Fc portion of an immunoglobulin. As to such embodiments the Fc binder may, for example comprise an scFv, a nanobody or a minibody. Similarly DLL3 binding domains compatible with such embodiments include any molecule that is capable of being bound by the Fc binder and immunospecifically reacting with DLL3. In some embodiments the DLL3 binding domain will comprise intact DLL3 monoclonal antibodies or mixtures of intact DLL3 monoclonal antibodies. In other embodiments the DLL3 binding domain may comprise intact polyclonal DLL3 antibodies (preferably fully human). In yet other embodiments the DLL3 binding domain may comprise a scFv-Fc construct. More generally, those of skill in the art will readily be able to identify proto-CAR compatible DLL3 binding regions based on the teachings of the instant disclosure.

[0137] Moreover, as would be readily recognized by those skilled in the art, the disclosed fragments, construct or derivatives can be obtained by molecular engineering or via chemical or enzymatic treatment (such as papain or pepsin) of an intact or complete antibody or antibody chain or by recombinant means. See, e.g., Fundamental Immunology, W. E. Paul, ed., Raven Press, N.Y. (1999), for a more detailed description of antibody fragments.

[0138] c. Post-Production Selection

[0139] No matter how obtained, antibody-producing cells (e.g., hybridomas, yeast colonies, etc.) may be selected, cloned and further screened for desirable characteristics including, for example, high affinity for DLL3. Hybridomas can be expanded in vitro in cell culture or in vivo in syngeneic immunocompromised animals. Methods of selecting, cloning and expanding hybridomas and/or colonies are well known to those of ordinary skill in the art. Once the desired antibodies are identified the relevant genetic material may be isolated, manipulated and expressed using common, art-recognized molecular biology and biochemical techniques.

[0140] The antibodies produced by naïve libraries (either natural or synthetic) may be of moderate affinity (Kₐ of about 10⁶ to 10⁷ M⁻¹). To enhance affinity, affinity maturation may be mimicked in vitro by constructing antibody libraries (e.g., by introducing random mutations in vitro by using error-prone polymerase) and reselecting antibodies with high affinity for the antigen from those secondary libraries (e.g. by using phage or yeast display). WO 9607754 describes a method for inducing mutagenesis in a CDR of an immunoglobulin light chain to create a library of light chain genes.

[0141] Various techniques can be used to select antibodies, including but not limited to, phage or yeast display in which a library of human combinatorial antibodies or scFv fragments is synthesized on phages or yeast, the library is screened with the antigen of interest or an antibody-binding portion thereof, and the phage or yeast that binds the antigen is isolated, from which one may obtain the antibodies or immunoreactive fragments (Vaughan et al., 1996, PMID: 9630891; Sheets et al., 1998, PMID: 9600934; Boder et al., 1997, PMID: 9181578; Pepper et al., 2008, PMID: 18336206). Kits for generating phage or yeast display libraries are commercially available. There also are other methods and reagents that can be used in generating and screening antibody display libraries (see U.S.P.N. 5,223,409; WO 92/18619, WO 91/17271, WO 92/20791, WO 92/15679, WO 93/01288, WO 92/01047, WO 92/09690; and Barbas et al., 1991, PMID: 1896445). Such techniques advantageously allow for the screening of large numbers of candidate antibodies and provide for relatively easy manipulation of sequences (e.g., by recombinant shuffling).

[0142] 4. Characteristics of DLL3 Binding Domains

[0143] In selected embodiments, antibody-producing cells (e.g., hybridomas or yeast colonies) may be selected, cloned and further screened for favorable properties including, for example, robust growth, high antibody production and, as discussed in more detail below, desirable binding domain characteristics. In other cases characteristics of the antibody may be imparted by selecting a particular antigen (e.g., a specific DLL3 domain) or immunoreactive fragment of the target antigen for inoculation of the animal. In still other embodiments the selected antibodies may be engineered as described above to enhance or refine immunochemical characteristics such as affinity or pharmacokinetics fragments.

[0144] a. Binding Domain Affinity

[0145] Disclosed herein are antibodies that have a high binding affinity for a specific determinant e.g. DLL3. The terms “immunospecifically binds” “specific binding,” “selective binding,” “selectively binds,” and “specifically binds,” refer to antibody binding to an epitope on a predetermined antigen. Typically, the antibody binds with an affinity (K_{D}) of approximately less than 10⁻⁷ M, such as approximately less than 10⁻⁸ M, 10⁻⁹ M or 10⁻¹⁰ M or even lower. The term “K_{D}” refers to the dissociation constant or apparent affinity of a particular antibody-antigen interaction.

[0146] More specifically an antibody of the invention can immunospecifically bind its target antigen when the dissociation constant K_{D} (k_{off}/kₒₙ) is ≦10⁻⁷ M. The antibody specifically binds antigen with high affinity when the K_{D} is ≦5×10⁻⁹ M, and with very high affinity when the K_{D} is ≦5×10⁻¹⁰ M. In one embodiment of the invention, the antibody has a K_{D} of ≦10⁻⁹ M and an off-rate of about 1×10⁻⁴/sec. In one embodiment of the invention, the off-rate is <1×10⁻⁵/sec. In other embodiments of the invention, the antibodies will bind to a determinant with a K_{D} of between about 10⁻⁷ M and 10⁻¹⁰ M, and in yet another embodiment it will bind with a K_{D}≦2×10⁻¹⁰ M. Still other selected embodiments of the invention comprise antibodies that have a K_{D} (k_{off}/kₒₙ) of less than 10⁻⁶ M, less than 5×10⁻⁶ M, less than 10⁻⁷ M, less than 5×10⁻⁷ M, less than 10⁻⁸ M, less than 5×10⁻⁸ M, less than 10⁻⁹ M, less than 5×10⁻⁹ M, less than 10⁻¹⁰ M, less than 5×10⁻¹⁰ M, less than 10⁻¹¹ M, less than 5×10⁻¹¹ M, less than 10⁻¹² M, less than 5×10⁻¹² M, less than 10⁻¹³ M, less than 5×10⁻¹³ M, less than 10⁻¹⁴ M, less than 5×10⁻¹⁴ M, less than 10⁻¹⁵ M or less than 5×10⁻¹⁵ M.

[0147] In certain embodiments, an antibody of the invention that immunospecifically binds to a determinant e.g. DLL3 may have an association rate constant or kₒₙ (or kₐ) rate (antibody+antigen (Ag)^{k}ₒₙ←antibody-Ag) of at least 10⁵ M^{-l}s^{-l}, at least 2×10⁵ M^{-l}s^{-l}, at least 5×10⁵ M^{-l}s^{-l}, at least 10⁶ M^{-l}s^{-l}, at least 5×10⁶ M^{-l}s^{-l}, at least 10⁷ M^{-l}s^{-l}, at least 5×10⁷ M^{-l}s^{-l}, or at least 10⁸ M^{-l}s^{-l}.

[0148] In another embodiment, an antibody of the invention that immunospecifically binds to a determinant e.g. DLL3 may have a disassociation rate constant or k_{off} (or k_{d}) rate (antibody+antigen (Ag)^{k}_{off}←antibody-Ag) of less than 10^{-l}s^{-l}, less than 5×10^{-l}s^{-l}, less than 10⁻² s^{-l}, less than 5×10⁻² s^{-l}, less than 10⁻³ s^{-l}, less than 5×10⁻³ s^{-l}, less than 10⁻⁴ s^{-l}, less than 5×10⁴ s^{-l}, less than 10⁻⁵ s^{-l}, less than 5×10⁻⁵ s^{-l}, less than 10⁻⁶ s^{-l}, less than 5×10⁻⁶ s^{-l} less than 10⁻⁷ s^{-l}, less than 5×10⁻⁷ s^{-l}, less than 10⁻⁸ s^{-l}, less than 5×10⁻⁸ s^{-l}, less than 10⁻⁹ s^{-l}, less than 5×10⁻⁹ s^{-l} or less than 10⁻¹⁰s^{-l}.

[0149] Binding affinity may be determined using various techniques known in the art, for example, surface plasmon resonance, bio-layer interferometry, dual polarization interferometry, static light scattering, dynamic light scattering, isothermal titration calorimetry, ELISA, analytical ultracentrifugation, and flow cytometry.

[0150] b. Binning and Epitope Mapping

[0151] As used herein, the term “binning” refers to methods used to group antibodies (or binding domains) into “bins” based on their antigen binding characteristics and whether they compete with each other. The initial determination of bins may be further refined and confirmed by epitope mapping and other techniques as described herein. However it will be appreciated that empirical assignment of antibodies to individual bins provides information that may be indicative of the therapeutic potential of the disclosed antibodies.

[0152] More specifically, one can determine whether a selected reference antibody (or fragment thereof) competes for binding with a second test antibody (i.e., is in the same bin) by using methods known in the art and set forth in the Examples herein. In one embodiment, a reference antibody is associated with DLL3 antigen under saturating conditions and then the ability of a secondary or test antibody to bind to DLL3 is determined using standard immunochemical techniques. If the test antibody is able to substantially bind to DLL3 at the same time as the reference anti-DLL3 antibody, then the secondary or test antibody binds to a different epitope than the primary or reference antibody. However, if the test antibody is not able to substantially bind to DLL3 at the same time, then the test antibody binds to the same epitope, an overlapping epitope, or an epitope that is in close proximity (at least sterically) to the epitope bound by the primary antibody. That is, the test antibody competes for antigen binding and is in the same bin as the reference antibody.

[0153] The term “compete” or “competing antibody” when used in the context of the disclosed antibodies means competition between antibodies as determined by an assay in which a test antibody or immunologically functional fragment being tested inhibits specific binding of a reference antibody to a common antigen. Typically, such an assay involves the use of purified antigen (e.g., DLL3 or a domain or fragment thereof) bound to a solid surface or cells, an unlabeled test antibody and a labeled reference antibody. Competitive inhibition is measured by determining the amount of label bound to the solid surface or cells in the presence of the test antibody. Usually the test antibody is present in excess and/or allowed to bind first. Additional details regarding methods for determining competitive binding are provided in the Examples herein. Usually, when a competing antibody is present in excess, it will inhibit specific binding of a reference antibody to a common antigen by at least 30%, 40%, 45%, 50%, 55%, 60%, 65%, 70% or 75%. In some instance, binding is inhibited by at least 80%, 85%, 90%, 95%, or 97% or more.

[0154] Conversely, when the reference antibody is bound it will preferably inhibit binding of a subsequently added test antibody (i.e., a DLL3 antibody) by at least 30%, 40%, 45%, 50%, 55%, 60%, 65%, 70% or 75%. In some instance, binding of the test antibody is inhibited by at least 80%, 85%, 90%, 95%, or 97% or more.

[0155] Generally binning or competitive binding may be determined using various art-recognized techniques, such as, for example, immunoassays such as western blots, radioimmunoassays, enzyme linked immunosorbent assay (ELISA), “sandwich” immunoassays, immunoprecipitation assays, precipitin reactions, gel diffusion precipitin reactions, immunodiffusion assays, agglutination assays, complement-fixation assays, immunoradiometric assays, fluorescent immunoassays and protein A immunoassays. Such immunoassays are routine and well known in the art (see, Ausubel et al, eds, (1994) Current Protocols in Molecular Biology, Vol. 1, John Wiley & Sons, Inc., New York). Additionally, cross-blocking assays may be used (see, for example, WO 2003/48731; and Harlow et al. (1988) Antibodies, A Laboratory Manual, Cold Spring Harbor Laboratory, Ed Harlow and David Lane).

[0156] Other technologies used to determine competitive inhibition (and hence “bins”), include: surface plasmon resonance using, for example, the BIAcore™ 2000 system (GE Healthcare); bio-layer interferometry using, for example, a ForteBio® Octet RED (ForteBio); or flow cytometry bead arrays using, for example, a FACSCanto II (BD Biosciences) or a multiplex LUMINEX™ detection assay (Luminex).

[0157] Luminex is a bead-based immunoassay platform that enables large scale multiplexed antibody pairing. The assay compares the simultaneous binding patterns of antibody pairs to the target antigen. One antibody of the pair (capture mAb) is bound to Luminex beads, wherein each capture mAb is bound to a bead of a different color. The other antibody (detector mAb) is bound to a fluorescent signal (e.g. phycoerythrin (PE)). The assay analyzes the simultaneous binding (pairing) of antibodies to an antigen and groups together antibodies with similar pairing profiles. Similar profiles of a detector mAb and a capture mAb indicates that the two antibodies bind to the same or closely related epitopes. In one embodiment, pairing profiles can be determined using Pearson correlation coefficients to identify the antibodies which most closely correlate to any particular antibody on the panel of antibodies that are tested. In preferred embodiments a test/detector mAb will be determined to be in the same bin as a reference/capture mAb if the Pearson's correlation coefficient of the antibody pair is at least 0.9. In other embodiments the Pearson's correlation coefficient is at least 0.8, 0.85, 0.87 or 0.89. In further embodiments, the Pearson's correlation coefficient is at least 0.91, 0.92, 0.93, 0.94, 0.95, 0.96, 0.97, 0.98, 0.99 or 1. Other methods of analyzing the data obtained from the Luminex assay are described in U.S.P.N. 8,568,992. The ability of Luminex to analyze 100 different types of beads (or more) simultaneously provides almost unlimited antigen and/or antibody surfaces, resulting in improved throughput and resolution in antibody epitope profiling over a biosensor assay (Miller, et al., 2011, PMID: 21223970).

[0158] “Surface plasmon resonance,” refers to an optical phenomenon that allows for the analysis of real-time specific interactions by detection of alterations in protein concentrations within a biosensor matrix.

[0159] In other embodiments, a technique that can be used to determine whether a test antibody “competes” for binding with a reference antibody is “bio-layer interferometry”, an optical analytical technique that analyzes the interference pattern of white light reflected from two surfaces: a layer of immobilized protein on a biosensor tip, and an internal reference layer. Any change in the number of molecules bound to the biosensor tip causes a shift in the interference pattern that can be measured in real-time. Such biolayer interferometry assays may be conducted using a ForteBio® Octet RED machine as follows. A reference antibody (Ab1) is captured onto an anti-mouse capture chip, a high concentration of non-binding antibody is then used to block the chip and a baseline is collected. Monomeric, recombinant target protein is then captured by the specific antibody (Ab1) and the tip is dipped into a well with either the same antibody (Ab1) as a control or into a well with a different test antibody (Ab2). If no further binding occurs, as determined by comparing binding levels with the control Ab1, then Ab1 and Ab2 are determined to be “competing” antibodies. If additional binding is observed with Ab2, then Ab1 and Ab2 are determined not to compete with each other. This process can be expanded to screen large libraries of unique antibodies using a full row of antibodies in a 96-well plate representing unique bins. In preferred embodiments a test antibody will compete with a reference antibody if the reference antibody inhibits specific binding of the test antibody to a common antigen by at least 40%, 45%, 50%, 55%, 60%, 65%, 70% or 75%. In other embodiments, binding is inhibited by at least 80%, 85%, 90%0, 95%, or 97% or more.

[0160] Once a bin, encompassing a group of competing antibodies, has been defined further characterization can be carried out to determine the specific domain or epitope on the antigen to which the antibodies in a bin bind. Domain-level epitope mapping may be performed using a modification of the protocol described by Cochran et al., 2004, PMID: 15099763. Fine epitope mapping is the process of determining the specific amino acids on the antigen that comprise the epitope of a determinant to which the antibody binds. The term “epitope” is used in its common biochemical sense and refers to that portion of the target antigen capable of being recognized and specifically bound by a particular antibody. In certain embodiments, epitopes or immunogenic determinants include chemically active surface groupings of molecules such as amino acids, sugar side chains, phosphoryl groups, or sulfonyl groups, and, in certain embodiments, may have specific three-dimensional structural characteristics, and/or specific charge characteristics. In certain embodiments, an antibody is said to specifically bind an antigen when it preferentially recognizes its target antigen in a complex mixture of proteins and/or macromolecules.

[0161] When the antigen is a polypeptide such as DLL3, epitopes may generally be formed from both contiguous amino acids and noncontiguous amino acids juxtaposed by tertiary folding of a protein (“conformational epitopes”). In such conformational epitopes the points of interaction occur across amino acid residues on the protein that are linearly separated from one another. Epitopes formed from contiguous amino acids (sometimes referred to as “linear” or “continuous” epitopes) are typically retained upon protein denaturing, whereas epitopes formed by tertiary folding are typically lost upon protein denaturing. An antibody epitope typically includes at least 3, and more usually, at least 5 or 8-10 amino acids in a unique spatial conformation. Methods of epitope determination or “epitope mapping” are well known in the art and may be used in conjunction with the instant disclosure to identify epitopes on DLL3 bound by the disclosed antibodies.

[0162] Compatible epitope mapping techniques include alanine scanning mutants, peptide blots (Reineke (2004) Methods Mol Biol 248:443-63), or peptide cleavage analysis. In addition, methods such as epitope excision, epitope extraction and chemical modification of antigens can be employed (Tomer (2000) Protein Science 9: 487-496). Other compatible methods comprise yeast display methods. In other embodiments Modification-Assisted Profiling (MAP), also known as Antigen Structure-based Antibody Profiling (ASAP) provides a method that categorizes large numbers of monoclonal antibodies directed against the same antigen according to the similarities of the binding profile of each antibody to chemically or enzymatically modified antigen surfaces (U.S.P.N. 2004/0101920). This technology allows rapid filtering of genetically identical antibodies, such that characterization can be focused on genetically distinct antibodies. It will be appreciated that MAP may be used to sort the DLL3 antibodies of the invention into groups of antibodies binding different epitopes.

[0163] Once a desired epitope on an antigen is determined, it is possible to generate antibodies to that epitope, e.g., by immunizing with a peptide comprising the epitope using techniques described in the present invention. Alternatively, during the discovery process, the generation and characterization of antibodies may elucidate information about desirable epitopes located in specific domains or motifs. From this information, it is then possible to competitively screen antibodies for binding to the same epitope. An approach to achieve this is to conduct competition studies to find antibodies that compete for binding to the antigen. A high throughput process for binning antibodies based upon their cross-competition is described in WO 03/48731. Other methods of binning or domain level or epitope mapping comprising antibody competition or antigen fragment expression on yeast are well known in the art.

[0164] B. Optional Hinge Region

[0165] As used herein, the term “hinge region” refers to a flexible polypeptide connector region (also referred to herein as “hinge”) that may be included within the CAR ectodomain (or extracellular domain) providing structural flexibility to flanking polypeptide regions. The hinge region may consist of natural or synthetic polypeptides. It will be appreciated by those skilled in the art that hinge regions may improve the function of the CAR by promoting optimal positioning of the DLL3 binding domain in relationship to the portion of the antigen recognized by the same. It will be appreciated that, in some embodiments, the hinge region may not be required for optimal CAR activity. In other embodiments a beneficial hinge region comprising a short sequence of amino acids promotes CAR activity by facilitating flexibility of the antigen binding domain or antibody. The sequence encoding the hinge region may be positioned between the antigen recognition moiety (e.g., an anti-DLL3 scFv) and the transmembrane domains. The hinge sequence can be any moiety or sequence derived or obtained from any suitable molecule. In one embodiment, for example, the hinge sequence is derived from the human CD8α molecule or a CD28 molecule. A “hinge region” derived from an immunoglobulin (e.g., IgGI) is generally defined as stretching from Glu216 to Pro230 of human IgG1. Hinge regions of other IgG isotypes may be aligned with the IgG1 sequence by placing the first and last cysteine residues forming inter-heavy chain disulfide (S—S) bonds in the same positions. In other embodiments the hinge region may be of natural occurrence or non-natural occurrence, including but not limited to an altered hinge region as described in U.S.P.N. 5,677,425. Of course, when certain binding domains such as (Fab′)₂ or an intact antibody are used in the CAR it will naturally follow that the corresponding hinge region will be included.

[0166] In other selected embodiments the hinge region can include complete hinge region derived from an antibody of a different class or subclass from that of the CH1 domain. The term “hinge region” can also include regions derived from human CD8a (aka CD8a) molecule or a CD28 molecule and any other receptors that provide a similar function in providing flexibility to flanking regions. The hinge region can have a length of from about 4 amino acids to about 50 amino acids, e.g., from about 4 aa to about 10 aa, from about 10 aa to about 15 aa, from about aa to about 20 aa, from about 20 aa to about 25 aa, from about 25 aa to about 30 aa, from about 30 aa to about 40 aa, or from about 40 aa to about 50 aa. Suitable hinge regions can be readily selected and can be of any of a number of suitable lengths, such as from 1 amino acid (e.g., Gly) to 20 amino acids, from 2 amino acids to 15 amino acids, from 3 amino acids to 12 amino acids, including 4 amino acids to 10 amino acids, 5 amino acids to 9 amino acids, 6 amino acids to 8 amino acids, or 7 amino acids to 8 amino acids, and can be 1, 2, 3, 4, 5, 6, or 7 amino acids.

[0167] Those skilled in the art will appreciate that compatible hinge regions are well known and, as such, operable embodiments may readily be selected and incorporated in the DLL3 CARs of the instant invention.

[0168] C. Transmembrane/Spacer Domain

[0169] As alluded to above, the DLL3 CARs of the instant invention preferably comprise a transmembrane domain that is interposed between the extracellular DLL3 binding domain and/or hinge region, and the intracellular or cytoplasmic signaling domain. For the purposes of the instant discussion the term “transmembrane domain” will be used with the understanding that while it always includes amino acid residues that are physically buried in the lipid bilayer of a cellular membrane, it may include support or “spacer domains” that can extend beyond either side of the cell membrane. Those of skill in the art can readily distinguish between the functional aspects of the CAR components and easily determine what constitutes a compatible transmembrane domain in view of the instant disclosure.

[0170] It will be appreciated that the transmembrane domain may be derived from a natural polypeptide, or may be artificially designed. Compatible transmembrane domains may be derived from any membrane-binding or transmembrane protein which may be modified or truncated as necessary. For example, transmembrane domains derived from a T cell receptor a or P chain, a Fc region of an IgG (such as IgG4), a CD3ζ chain, CD28, CD3ε, CD45, CD4, CD5, CD8 (e.g. CD8a aka CD8α), CD9, CD16, CD22, CD33, CD37, CD64, CD80, CD86, CD134, CD137, ICOS, CD154 or a GITR are all compatible with various embodiments of the disclosed DLL3 CAR constructs. In certain embodiments it is preferred to employ the transmembrane domain of CD8ζ, FcRη, FcεR1-γ and −β, MB1 (Igα), B29 or CD3-γ, ζ, or ε, in order to retain physical association with other members of the receptor complex. Compatible artificial transmembrane domains may comprise various polypeptide sequences incorporating high levels of hydrophobic residues such as leucine and valine. In other preferred embodiments the transmembrane domain may comprise a triplet of phenylalanine, tryptophan and valine which is located at each end of the synthetic transmembrane domain.

[0171] Certain embodiments of the invention will comprise transmembrane domains having a spacer. In the DLL3 CARs of the present invention, a “spacer domain” or “spacer region” is an amino acid sequence that can be arranged between an extracellular functional domain (e.g., the antigen binding domain or the hinge region if included) and the transmembrane domain, or between the intracellular signaling domain and the transmembrane domain. The spacer domain means any oligopeptide or polypeptide that serves to link the transmembrane domain with the extracellular domain and/or the transmembrane domain with the intracellular domain, with the intent to optimally position these elements within the CAR polypeptide for efficient CAR function. The spacer domain comprises up to 300 amino acids, preferably 10 to 100 amino acids, and most preferably 25 to 50 amino acids. The spacer domain preferably has a sequence that promotes binding of the DLL3 CAR with DLL3 and enhances transmembrane signaling into a cell. Examples of amino acids that are expected to promote the binding include cysteine, a charged amino acid, and serine and threonine in a potential glycosylation site, and these amino acids can be used as an amino acid constituting the spacer domain. In preferred embodiments the spacer may comprise all or part of an antibody constant region (e.g., IgG1 CH or CL) which may optionally dimerize.

[0172] Other compatible spacers include glycine polymers (G)ₙ, glycine-serine polymers, glycine-alanine polymers, alanine-serine polymers, and other flexible spacers known in the art. Glycine and glycine-serine polymers can be used; both Gly and Ser are relatively unstructured, and therefore can serve as a neutral tether between components. Glycine polymers can be used; glycine accesses significantly more phi-psi space than even alanine, and is much less restricted than residues with longer side chains.

[0173] Those skilled in the art will appreciate that compatible transmembrane domains are well known in the art and, as such, operable embodiments may readily be selected and incorporated in the DLL3 CARs of the instant invention.

[0174] D. Intracellular Signaling Domain

[0175] In addition to the extracellular DLL3 binding domain and the transmembrane domain, the DLL3 CARs of the instant invention will incorporate an intracellular or cytoplasmic domain comprising at least one signaling and/or T cell activating moiety. The intracellular signaling domain used in the present invention is a molecule that can transmit one or more signals into a cell when the extracellular domain present within (or non-covalently associated with) the same molecule binds to (interacts with) DLL3. The binding of DLL3 triggers a signal that passes along the CAR and is transmitted intracellularly to activate the sensitized lymphocyte. This lymphocyte activation triggers the desired immune response that results in the elimination of the target cell.

[0176] The two signal theory of T-lymphocyte activation proposes that two signals are required to efficiently activate T-cells: first, antigenic peptides presented in the context of an MHC molecule interact with the alpha:beta chain heterodimer of the TCR, leading to conformational changes that result in activation of a signal from the cytoplasmic domains found in protein components of the TCR complex; and second, transmission of a signal from the cytoplasmic domain of a single or several costimulatory molecules as they interact with their cognate ligands on the cell presenting the peptide:MHC complex. More specifically it is known that a signal generated only via a TCR complex may be insufficient to activate a T cell, and a secondary or costimulating signal is also required to avoid a state of T-cell inactivity known an anergy. Natural T cell-activation is transmitted by two different kinds of cytoplasmic signaling sequences, that is, a sequence for initiating antigen-dependent primary activation via a TCR complex (primary cytoplasmic signaling sequence) and a sequence for acting antigen-independently to provide a secondary or costimulating signal (secondary cytoplasmic signaling sequence). In a preferable aspect, the DLL3 CAR of the present invention comprises the primary cytoplasmic signaling sequence and/or the secondary cytoplasmic signaling sequence as the CAR endodomain.

[0177] In general, signaling motifs found in the cytoplasmic domains of immune system receptors may be activating or inhibitory. The primary cytoplasmic signaling sequence that stimulates the activation may comprise a signal transduction motif known as an immunoreceptor tyrosine-based activation motif (ITAM) [Nature, vol. 338, pp. 383-384 (1989)]. On the other hand, the primary cytoplasmic signaling sequence that acts in an inhibitory way comprises a signal transduction motif known as an immunoreceptor tyrosine-based inhibition motif (ITIM). In the present invention, an intracellular domain having an ITAM or an ITIM can be used.

[0178] The primary cytoplasmic signaling sequence that transmits the first stimulating signal for T-cell activation from the native TCR complex is an ITAM found in the CD3ζ chain, but it is known that other ITAMs may also be employed to transmit positive primary activating signal. Examples of the intracellular domain having an ITAM that can be used in the present invention include intracellular domains having ITAM derived from CD3ζ, FcRγ, FcRβ, CD3γ, CD3 δ, CD3ε, CD5, CD22, CD79a, CD79b, and CD66d. Specifically, examples of the ITAM include peptides having sequences of amino acid numbers 51 to 164 of CD3ζ (NCBI RefSeq: NP_932170.1), amino acid numbers 45 to 86 of FcεRIγ (NCBI RefSeq: NP_004097.1), amino acid numbers 201 to 244 of FcεRIβ (NCBI RefSeq: NP_000130.1), amino acid numbers 139 to 182 of CD3γ (NCBI RefSeq: NP_000064.1), amino acid numbers 128 to 171 of CD3 δ (NCBI RefSeq: NP_000723.1), amino acid numbers 153 to 207 of CD3c (NCBI RefSeq: NP_000724.1), amino acid numbers 402 to 495 of CD5 (NCBI RefSeq: NP_055022.2), amino acid numbers 707 to 847 of 0022 (NCBI RefSeq: NP_001762.2), amino acid numbers 166 to 226 of CD79a (NCBI RefSeq: NP_001774.1), amino acid numbers 182 to 229 of CD79b (NCBI RefSeq: NP_000617.1), and amino acid numbers 177 to 252 of CD66d (NCBI RefSeq: NP_001806.2), and their variants having the same function as these peptides have. The amino acid number based on amino acid sequence information of NCBI RefSeq ID or GenBank described herein is numbered based on the full length of the precursor (comprising a signal peptide sequence etc.) of each protein.

[0179] The secondary, costimulatory signal may come from the cytoplasmic domain of a variety of costimulatory molecules, the best characterized of which is CD28. CD28 is expressed on T-cells and is the receptor for CD80 (B7.1) and CD86 (B7.2). However, other costimulatory molecules include, but are not limited to the CD27 molecule, the CD137/4-1BB molecule, the CD134/OX40 molecule, and other intracellular signaling molecules known in the art. CD134/OX40 is known to enhance T-cell clonal expansion, likely by suppressing apoptosis, and may play a role in the establishment of memory cells. 4-1BB, also known as CD137, transmits a potent costimulatory signal to T-cells, promoting differentiation and enhancing long-term survival of T lymphocytes. As each of these costimulatory molecules activates different intracellular signaling pathways and may have differing effects in different populations of T-lymphocytes, domains from, one, several, or each may be included in the endodomain of the CAR in order to maximize T-cell activation and other desired properties of the CAR. In a preferred embodiment, the CD28, CD27, 4-1BB, and OX40 molecules are human. Examples of the intracellular domain comprising a secondary cytoplasmic signaling sequence that can be used in the present invention include sequences derived from CD2, CD4, CD5, CD8α, CD83, CD28, CD134, CD137 (4-1BB), ICOS, and CD154. Specific examples thereof include peptides having sequences of amino acid numbers 236 to 351 of CD2 (NCBI RefSeq: NP-001758.2), amino acid numbers 421 to 458 of CD4 (NCBI RefSeq: NP-000607.1), amino acid numbers 402 to 495 of CD5 (NCBI RefSeq: NP-055022.2), amino acid numbers 207 to 235 of CD8a (NCBI RefSeq: NP-001759.3), amino acid numbers 196 to 210 of CD83 (GenBank: AAA35664.1), amino acid numbers 181 to 220 (SEQ ID NO: 25) of CD28 (NCBI RefSeq: NP-006130.1), amino acid numbers 214 to 255 of CD137 (4-1BB, NCBI RefSeq: NP-001552.2), amino acid numbers 241 to 277 of CD134 (OX40, NCBI RefSeq: NP-003318.1), and amino acid numbers 166 to 199 of ICOS (NCBI RefSeq: NP-036224.1), and their variants having the same function as these peptides have.

[0180] The signaling/activating domain(s) of the DLL3 CAR encoded by the disclosed nucleic acid sequence can comprise any one of aforementioned signaling domains and any one or more of the aforementioned intercellular T-cell activating domains in any combination. For example, the inventive nucleic acid sequence can encode a CAR comprising a CD28 signaling domain and intracellular T-cell activating domains of CD28 and CD34. Alternatively, for example, the nucleic acid sequences of the invention can encode a CAR comprising a CD8α signaling domain and T cell signaling domains of CD28, CD3ζ, the Fc receptor gamma (FcRγ) chain, and/or 4-1BB. As shown in the Examples below selected embodiments may comprise a 4-1BB costimulatory region along with a CD3ζ cytoplasmic region or variants thereof.

[0181] Those skilled in the art will appreciate that each of the aforementioned signaling/stimulatory domains are compatible with the instant invention and may be used effectively (alone or preferably in combination) with the disclosed DLL3 CARs. Accordingly, each of the aforementioned moieties, in any combination or configuration are expressly contemplated as being within the scope of the instant invention as components of the intracellular/cytoplasmic domain.

### V. CAR Nucleic Acids and Vectors

[0182] The invention provides an isolated or purified nucleic acid sequence encoding an anti-DLL3 chimeric antigen receptor, wherein the CAR preferably comprises an extracellular DLL3 binding domain (e.g., a scFv), a transmembrane domain and an intracellular signaling domain (e.g., a T-cell activation moiety). As used herein “nucleic acid sequence” is intended to encompass a polymer of DNA or RNA, i.e., a polynucleotide, which can be single-stranded or double-stranded and which can contain non-natural or altered nucleotides. The terms “nucleic acid” and “polynucleotide” as used herein refer to a polymeric form of nucleotides of any length, either ribonucleotides (RNA) or deoxyribonucleotides (DNA). These terms refer to the primary structure of the molecule, and thus include double- and single-stranded DNA, and double- and single-stranded RNA. The terms include, as equivalents, analogs of either RNA or DNA made from nucleotide analogs and modified polynucleotides such as, though not limited to methylated and/or capped polynucleotides.

[0183] By “isolated” is meant the removal of a nucleic acid from its natural environment. By “purified” is meant that a given nucleic acid, whether one that has been removed from nature (including genomic DNA and mRNA) or synthesized (including cDNA) and/or amplified under laboratory conditions, has been increased in purity, wherein “purity” is a relative term, not “absolute purity.” It is to be understood, however, that nucleic acids and proteins may be formulated with diluents or adjuvants and still for practical purposes be isolated. For example, nucleic acids typically are mixed with an acceptable carrier or diluent when used for introduction into cells.

[0184] As described herein and shown in the appended Examples, nucleic acid sequences compatible with the invention can be generated using methods known in the art. For example, nucleic acid sequences, polypeptides, and proteins can be recombinantly produced using standard recombinant DNA methodology (see, e.g., Sambrook et al., Molecular Cloning: A Laboratory Manual, 3rd ed., Cold Spring Harbor Press, Cold Spring Harbor, N.Y. 2001). Further, a synthetically produced nucleic acid sequence encoding the DLL3 CAR can be isolated and/or purified from a source, such as a CHO cell, plant, a bacterium, an insect, or a mammal, e.g., a rat, a human, etc. Methods of isolation and purification are well known in the art. Alternatively, the nucleic acid sequences described herein can be commercially synthesized. In this respect, the inventive nucleic acid sequence can be synthetic, recombinant, isolated, and/or purified.

[0185] A nucleic acid sequence of the invention can encode a DLL3 CAR of any length, i.e., the CAR can comprise any number of amino acids, provided that the CAR retains its biological activity, e.g., the ability to specifically bind to antigen and treat or prevent disease in a mammal, etc. For example, the CAR can comprise 50 or more, 60 or more, 100 or more, 250 or more, or 500 or more amino acids. Preferably, the CAR is about 50 to about 700 amino acids (e.g., about 70, about 80, about 90, about 150, about 200, about 300, about 400, about 550, or about 650 amino acids), about 100 to about 500 amino acids (e.g., about 125, about 175, about 225, about 250, about 275, about 325, about 350, about 375, about 425, about 450, or about 475 amino acids), or a range defined by any two of the foregoing values.

[0186] Included in the scope of the invention are nucleic acid sequences that encode functional portions of the DLL3 CAR described herein. The term “functional portion,” when used in reference to a CAR, refers to any part or fragment of the CAR of the invention, which part or fragment retains the biological activity of the CAR of which it is a part (the parent CAR). Functional portions encompass, for example, those parts of a CAR that retain the ability to recognize target cells or provide an immunomodulatory signal, or treat a disease, to a similar extent, the same extent, or to a higher extent, as the parent CAR. In reference to a nucleic acid sequence encoding the parent DLL3 CAR, a nucleic acid sequence encoding a functional portion of the CAR can encode a protein comprising, for example, about 10%, 25%, 30%, 50%, 68%, 80%, 90%, 95%, or more, of the parent CAR. In this regard compatible nucleic acid sequences can encode a functional portion of a CAR that contains additional amino acids at the amino or carboxy terminus of the portion, or at both termini, which additional amino acids are not found in the amino acid sequence of the parent CAR. Desirably, the additional amino acids do not interfere with the biological function of the functional portion, e.g., recognize target cells, detect cancer, treat or prevent cancer, etc. More desirably, the additional amino acids enhance the biological activity of the CAR, as compared to the biological activity of the parent CAR.

[0187] The invention also provides nucleic acid sequences encoding functional variants of the DLL3 CAR. The term “functional variant,” as used herein, refers to a CAR, a polypeptide, or a protein having substantial or significant sequence identity or similarity to the CAR encoded by the disclosed nucleic acid sequences, which functional variant retains the DLL3 binding capacity of the CAR of which it is a variant. Functional variants encompass, for example, those variants of the CAR described herein (the parent CAR) that retain the ability to recognize DLL3 positive target cells to a similar extent, the same extent, or to a higher extent, as the parent CAR. In reference to a nucleic acid sequence encoding the parent CAR, a nucleic acid sequence encoding a functional variant of the CAR can be for example, about 10% identical, about 25% identical, about 30% identical, about 50% identical, about 65% identical, about 80% identical, about 90% identical, about 95% identical, or about 99% identical to the nucleic acid sequence encoding the parent CAR.

[0188] Regardless of the precise form of the DLL3 CAR it will be appreciated that the nucleic acids of the present invention may be used for ex vivo transformation of selected host cells (e.g., lymphocytes) or introduced directly into the subject for in vivo gene therapy. In each case the disclosed nucleic acids may be combined with a substance that promotes transference of a nucleic acid into a cell, for example, a reagent for introducing a nucleic acid such as a liposome or a cationic lipid, in addition to other excipients disclosed herein. In certain preferred embodiments the nucleic acids of the instant invention will be combined with, or integrated into, a vector is suitable for in vivo gene therapy.

[0189] Accordingly, in conjunction with the foregoing the present invention provides compositions comprising DLL3 CAR nucleic acids which, together with a pharmaceutically acceptable carrier, may be used as an active ingredient (e.g., in in vivo gene therapy) or to generate sensitized lymphocytes. Suitable pharmaceutically acceptable additives are well known to a person skilled in the art. Examples of the pharmaceutically acceptable additives or excipients include phosphate buffered saline (e.g. 0.01 M phosphate, 0.138 M NaCl, 0.0027 M KCl, pH 7.4), an aqueous solution containing a mineral acid salt such as a hydrochloride, a hydrobromide, a phosphate, or a sulfate, saline, a solution of glycol or ethanol, and a salt of an organic acid such as an acetate, a propionate, a malonate or a benzoate. An adjuvant such as a wetting agent or an emulsifier, and a pH buffering agent can also be used. Compositions of the present invention can be formulated into a known form suitable for parenteral administration, for example, injection or infusion. Further, such compositions may comprise formulation additives such as a suspending agent, a preservative, a stabilizer and/or a dispersant, and a preservation agent for extending a validity term during storage. Further the composition may be in a dry form for reconstitution with an appropriate sterile liquid prior to use.

[0190] In addition to the nucleic acid sequence encoding the DLL3 CAR, compatible vectors preferably comprise expression control sequences, such as promoters, enhancers, polyadenylation signals, transcription terminators, internal ribosome entry sites (IRES), and the like, that provide for the expression of the nucleic acid sequence in a host cell. In this regard a large number of promoters, including constitutive, inducible, and repressible promoters, from a variety of different sources are well known in the art. Representative sources of promoters include for example, virus, mammal, insect, plant, yeast, and bacteria, and suitable promoters from these sources are readily available, or can be made synthetically, based on sequences publicly available, for example, from depositories such as the ATCC as well as other commercial or individual sources. Promoters can be unidirectional (i.e., initiate transcription in one direction) or bi-directional (i.e., initiate transcription in either a 3′ or 5′ direction). Non-limiting examples of promoters include, for example, the T7 bacterial expression system, pBAD (araA) bacterial expression system, the cytomegalovirus (CMV) promoter, the SV40 promoter, and the RSV promoter. Inducible promoters include, for example, the Tet system, the Ecdysone inducible system, the T-REX™ system (Invitrogen, Carlsbad, Calif.), LACSWITCH™ System (Stratagene, San Diego, Calif.), and the Cre-ERT tamoxifen inducible recombinase system. In addition the DLL3 CAR may be associated with a gene that can be a marker for confirming expression of the nucleic acid (e.g. a drug resistance gene, a gene encoding a reporter enzyme, or a gene encoding a fluorescent protein).

[0191] In certain embodiments the nucleic acid encoding the DLL3 CAR, along with any control elements, can preferably be inserted into a vector that can then be introduced into a selected cell to provide the disclosed DLL3 sensitized lymphocytes. In preferred embodiments the vector can be, for example, a plasmid, a transposon, a cosmid or a viral vector (e.g., phage, retroviral, lentiviral or adenoviral). For example, a virus vector such as a retrovirus vector (including an oncoretrovirus vector, a lentivirus vector, and a pseudo type vector), an adenovirus vector, an adeno-associated virus (AAV) vector, a simian virus vector, a vaccinia virus vector or a sendai virus vector, an Epstein-Barr virus (EBV) vector, and a HSV vector can be used.

[0192] More generally the terms “vector”, “cloning vector” and “expression vector” mean the vehicle by which a DNA or RNA sequence (e.g., a foreign gene encoding a DLL3 CAR) can be introduced into a host cell, so as to transform the host and promote expression (e.g. transcription and translation) of the introduced sequence. It will be appreciated that the introduced gene or sequence may include regulatory or control sequences, such as start, stop, promoter, signal, secretion, or other sequences used by a cell's genetic machinery. As described herein compatible vectors are well known in the art and include plasmids, transposons, phages, viruses, etc. The vector may then be used to transform the selected lymphocytes (autologous or allogeneic) to provide the disclosed sensitized lymphocytes. For the purposes of the instant disclosure the term “transform” or “transformation” will be used in its most general sense and shall be held to mean the introduction of a heterologous gene, DNA or RNA sequence to a host cell (prokaryotic or eukaryotic), so that the host cell will express the introduced gene or sequence to produce a desired substance, typically a protein or enzyme coded by the introduced gene or sequence. Exemplary methods of cell transformation compatible with the invention comprise transfection and transduction. As used herein the term “transfection” means the introduction of a foreign nucleic acid or gene into a cell (prokaryotic or eukaryotic) using physical or chemical means while the term “transduction” means the introduction of a foreign nucleic acid or gene into a cell (prokaryotic or eukaryotic) through use of a viral vector.

[0193] In terms of transduction phage or viral vectors can be introduced into host cells, preferably after growth of infectious particles in suitable packaging cells, many of which are commercially available. Compatible transduction methods and packaging cells are set forth in the Examples below and would be readily discernable to the skilled artisan in view of the instant disclosure.

[0194] By way of example, when a retrovirus vector is to be used, compositions compatible with the teachings herein can be generated by selecting a suitable packaging cell based on a LTR sequence and a packaging signal sequence possessed by the vector and preparing a retrovirus particle using the packaging cell. Examples of the packaging cell include PG13 (ATCC CRL-10686), PA317 (ATCC CRL-9078), GP+E-86 and GP+envAm-12, and Psi-Crip. A retrovirus particle can also be prepared using a 293 cell or a 293T cell having high transfection efficiency. Many kinds of retrovirus vectors produced based on retroviruses and packaging cells that can be used for packaging of the retrovirus vectors are widely commercially available from many companies. Similar systems are also commercially available for the fabrication of compatible lentiviral vectors in accordance with the teachings herein. Such vectors may be used to transduce selected lymphocyte populations to provide the desired DLL3 sensitized lymphocytes.

[0195] In addition, non-viral packaging vector systems can also be used in the present invention in combination with a liposome and a condensing agent such as a cationic lipid as described in WO 96/10038, WO 97/18185, WO 97/25329, WO 97/30170 and WO 97/31934 (which are incorporated herein by reference).

[0196] Similarly, many methods of transfection are compatible with the instant invention and may be used in conjunction with the teachings herein to provide the desired compositions. As discussed, transfection typically refers to the introduction of one or more exogenous polynucleotides into a host cell by using physical or chemical methods. Many transfection techniques are known in the art and include, for example, calcium phosphate DNA co-precipitation; DEAE-dextran; electroporation; cationic liposome-mediated transfection; tungsten particle-facilitated microparticle bombardment; and strontium phosphate DNA co-precipitation. Additionally, electroporation, sonoporation, impalefection, optical transfection and hydro dynamic delivery comprise some non-chemical based gene transfection methods compatible with the instant invention.

[0197] Regardless of which methodology is selected to effect transformation, it will be appreciated that the DLL3 CAR nucleic acid constructs and vectors may be used to generate the disclosed sensitized lymphocytes.

### VI. Host Cells

[0198] A vector comprising a nucleic acid encoding the DLL3 CAR can be introduced into any host cell that is capable of carrying and/or expressing the CAR protein, including any suitable prokaryotic or eukaryotic cell. Particularly compatible methods of transformation comprise the use of lentiviral, and retroviral systems along with transposons and naked RNA. Preferred host cells are those that can be easily and reliably grown, have reasonably fast growth rates, have well characterized expression systems, and can be transformed or transfected easily and efficiently.

[0199] As used herein, the term “host cell” refers to any type of cell that can contain the expression vector. The host cell can be a eukaryotic cell (e.g., plant, animal, fungi, or algae), a prokaryotic cell (e.g., bacteria or protozoa) or a viral or retroviral vector. The host cell can be a cultured or “off-the-shelf” cell or a primary cell (i.e., isolated directly from a subject). The host cell can be an adherent cell or a suspended cell, i.e., a cell that grows in suspension. Suitable host cells are known in the art and include, for instance, DH5α E. coli cells, Chinese hamster ovarian cells, monkey VERO cells, COS cells, HEK293 cells, and the like. For purposes of amplifying or replicating the recombinant expression vector, the host cell may be a prokaryotic cell, e.g., a DH5α cell. For purposes of producing a recombinant CAR, the host cell can be a mammalian cell. The host cell preferably is a human cell. The host cell can be of any cell type, can originate from any type of tissue, and can be of any developmental stage. For example, a cell collected, isolated, purified or induced from a body fluid, a tissue or an organ such as blood (peripheral blood, umbilical cord blood etc.) or bone marrow can be used. A peripheral blood mononuclear cell (PBMC), an immune cell [a dendritic cell, a B cell, a hematopoietic stem cell, a macrophage, a monocyte, a NK cell or a hematopoietic cell (a neutrophil, a basophil)], an umbilical cord blood mononuclear cell, a fibroblast, a precursor adipocyte, a hepatocyte, a skin keratinocyte, a mesenchymal stem cell, an adipose stem cell, various cancer cell strains, or a neural stem cell can be used. In particularly preferred embodiments the host cell can be a peripheral blood lymphocyte (PBL), a peripheral blood mononuclear cell (PBMC), or a natural killer (NK) cell. In selected embodiments the host cell is a natural killer (NK) cell. In other preferred embodiments the host cell will be a T-cell. Methods for selecting suitable mammalian host cells and methods for transformation, culture, amplification, screening, and purification of cells are known in the art.

[0200] The invention provides an isolated host cell that expresses nucleic acid sequence encoding the DLL3 CARs described herein or compositions of the same. In particularly preferred embodiments the host cell comprises a lymphocyte which is transformed into a DLL3 sensitized lymphocyte upon expression of the disclosed CARs. In one embodiment, the host cell is a T-cell. The T-cell of the invention can be any T-cell, such as a cultured T-cell (e.g., a primary T-cell, or a T-cell from a cultured T-cell line, or a T-cell obtained from a mammal). If obtained from a mammal, the T-cell can be obtained from numerous sources, including but not limited to blood, bone marrow, lymph node, the thymus, or other tissues or fluids. T-cells can also be enriched for or purified. The T-cell preferably is a human T-cell (e.g., isolated from a human). The T-cell can be of any developmental stage, including but not limited to, a CD4+/CD8+ double positive T-cell, a CD4+ helper T-cell, e.g., Th1 and The cells, a CD8+ T-cell (e.g., a cytotoxic T-cell), a tumor infiltrating cell, a memory T-cell, a naïve T-cell, and the like. In one embodiment, the T-cell is a CD8+ T-cell or a CD4+ T-cell. T-cell lines are available from commercial sources (e.g., the American Type Culture Collection and the German Collection of Microorganisms and Cell Cultures) and include, for example, Jurkat cells (ATCC TIB-152), Sup-T1 cells (ATCC CRL-1942), RPMI 8402 cells (DSMZ ACC-290), Karpas 45 cells (DSMZ ACC-545), and derivatives thereof.

[0201] In another embodiment, the host cell is a natural killer (NK) cell. NK cells are a type of cytotoxic lymphocyte that plays a role in the innate immune system. NK cells are defined as large granular lymphocytes and constitute the third kind of cells differentiated from the common lymphoid progenitor which also gives rise to B and T lymphocytes (see, e.g., Immunobiology, 5th ed., Janeway et al., eds., Garland Publishing, New York, N.Y. (2001)). NK cells differentiate and mature in the bone marrow, lymph node, spleen, tonsils, and thymus. Following maturation. NK cells enter into the circulation as large lymphocytes with distinctive cytotoxic granules. NK cells are able to recognize and kill some abnormal cells, such as, for example, some tumor cells and virus-infected cells, and are thought to be important in the innate immune defense against intracellular pathogens. As described above with respect to T-cells, the NK cell can be any NK cell, such as a cultured NK cell, e.g., a primary NK cell, or an NK cell from a cultured NK cell line, or an NK cell obtained from a mammal. If obtained from a mammal, the NK cell can be obtained from numerous sources, including but not limited to blood, bone marrow, lymph node, the thymus, or other tissues or fluids. NK cells can also be enriched for or purified. The NK cell preferably is a human NK cell (e.g., isolated from a human). NK cell lines are available from commercial sources (e.g., the American Type Culture Collection) and include, for example, NK-92 cells (ATCC CRL-2407), NK92MI cells (ATCC CRL-2408), and derivatives thereof.

[0202] In autologous adoptive immunotherapy, a patient's circulating lymphocytes, or tumor infiltrated lymphocytes, are isolated (e.g., by apheresis) in vitro, preferably activated or stimulated by lymphokines such as IL-2 and then transduced with nucleic acids encoding a DLL3 CAR construct. Following transduction the autologous sensitized lymphocytes are preferably expanded using cytokine support as known in the art and readministered to the patient. To achieve this, one would administer to an animal, or human patient, an immunologically effective amount of activated lymphocytes genetically modified to express a DLL3 CAR gene as described herein. In such autologous procedures the activated lymphocytes (i.e., DLL3 sensitized lymphocytes) are the patient's own cells that most preferably were earlier isolated from a blood or tumor sample and activated and expanded in vitro. In some aspects of the present invention T lymphocytes or NK cells from a patient having cancer would be isolated and transduced with SCT1-h16.15 polynucleotides (e.g., see Example 10 below) so that the DLL3 CAR is expressed on the cell surface of the T cell or NK cell. The modified cells would then be readministered into the patient to target and kill the tumor cells (see generally FIG. 5).

[0203] Other preferred aspects of the invention comprise allogeneic transplants of DLL3 sensitized lymphocytes. In such embodiments the disclosed DLL3 CARs may be introduced (e.g., through transduction) into lymphocytes obtained from a source other than the subject to be treated. Some aspects of the instant invention comprise the use of allogeneic lymphocytes obtained from a donor that has been immunologically matched with the recipient to reduce the chance of rejection. In other aspects the disclosed CARs will be introduced into “off-the-shelf” allogeneic lymphocytes (see PMID: 26183927 which is incorporated herein by reference) that have been modified to facilitate transplantation and generate the appropriate immune response upon contact with the target cell. It will be appreciated that the use of such prefabricated allogeneic lymphocyte preparations may provide several advantages in terms of preparing the pharmaceutically active sensitized lymphocytes and reducing the chances of patient rejection.

[0204] It will also be appreciated that the selected host cells can be expanded in vitro before or after transformation with the DLL3 CAR. Methods for expanding the selected cell populations are well known in the art and several commercial kits compatible with the instant invention are available. In this regard T cells and or NK cells may be expanded in vitro to provide more robust dosing options. For example, in accordance with the present invention NK cells may be preferentially expanded by exposure to cells that lack or poorly express major histocompatibility complex I and/or II molecules and which have been genetically modified to express membrane bound IL-15 and 4-1BB ligand (CDI37L). Such cell lines include, but are not necessarily limited to, K562 (ATCC, CCL 243), and the Wilms tumor cell line HFWT, the uterine endometrium tumor cell line HHUA, the melanoma cell line HMV-II, the hepatoblastoma cell line HuH-6, the lung small cell carcinoma cell lines Lu-130 and Lu-134-A, the neuroblastoma cell lines NB 19 and N1369, the embryonal carcinoma cell line from testis NEC 14, the cervix carcinoma cell line TCO-2, and the bone marrow-metastated neuroblastoma cell line TNB 1. Preferably the cell line used lacks or poorly expresses both MHC I and II molecules, such as the K562 and HFWT cell lines. Similar techniques allow for the expansion of selected T cell populations. In this regard some processes employ anti-CD3 plus autologous or allogeneic feeder cells and high doses of IL-2. Other processes use IL-7, 11-15, IL-21 or combinations thereof for expansion and stimulation of T cells. It will be appreciated that each of the aforementioned processes, along with any process that provides the desired number of DLL3 sensitized lymphocytes, is compatible with the instant invention.

### VII. Formulation and Administration of DLL3 Sensitized Lymphocytes

[0205] As set forth herein the selected host cells can be expanded in vitro for use in adoptive cellular immunotherapy comprising autologous or allogeneic DLL3 sensitized lymphocytes. In this regard the compositions and methods of this invention can be used to generate a population of sensitized lymphocytes that preferably deliver both primary and costimulatory signals for use in the treatment of cancer and, by way of example, the treatment of lung cancer including small cell lung cancer, melanoma, breast cancer, prostate cancer, colon cancer, renal cell carcinoma, ovarian cancer, neuroblastoma, rhabdomyosarcoma, leukemia and lymphoma. The compositions and methods described in the present invention may be used in conjunction with other types of therapy for cancer, such as chemotherapy, surgery, radiation, gene therapy, and so forth.

[0206] The DLL3 sensitized lymphocytes or host cells are preferably administered to a subject in the form of a pharmaceutical composition comprising one or more pharmaceutically acceptable carriers. In particularly preferred embodiments the disclosed pharmaceutical compositions will comprise a population of T cells or NK cells (autologous or allogeneic) that express the DLL3 CAR. Besides such host cells pharmaceutical compositions of the invention can comprise other pharmaceutically active agents or drugs, such as chemotherapeutic agents (e.g., asparaginase, busulfan, carboplatin, cisplatin, daunorubicin, doxorubicin, fluorouracil, gemcitabine, hydroxyurea, methotrexate, paclitaxel, rituximab, vinblastine, vincristine, etc.) or adjuvant therapies that further stimulate the immune response. In a preferred embodiment, the pharmaceutical composition comprises isolated T cells or NK cells which express the disclosed DLL3 CARs and more preferably a population of sensitized T cells or NK cells which express the disclosed DLL3 CARs. In addition such compositions may comprise a pharmaceutically acceptable buffers, preservatives, excipients, etc. as is well known in the art.

[0207] Alternatively, nucleic acid sequences encoding the DLL3 CAR, or vectors comprising a DLL3 CAR-encoding nucleic acid sequence, can be formulated into a pharmaceutical composition and administered directly to the patient. In such embodiments vector systems comprising viral vector host cells (e.g., lentiviral systems or retroviral systems) or directed artificial viral envelopes are preferred. Such vectors allow for the in vivo generation of DLL3 sensitized lymphocytes which can then induce the desired anti-tumor immune response.

[0208] In any event the DLL3 CAR host cells of the invention and any co-reagents can be formulated in various ways using art recognized techniques. In some embodiments, the therapeutic compositions of the invention can be administered neat or with a minimum of additional components while others may optionally be formulated to contain suitable pharmaceutically acceptable carriers. As used herein, “pharmaceutically acceptable carriers” comprise excipients, vehicles, adjuvants and diluents that are well known in the art and can be available from commercial sources for use in pharmaceutical preparation (see, e.g., Gennaro (2003) Remington: The Science and Practice of Pharmacy with Facts and Comparisons: Drugfacts Plus, 20th ed., Mack Publishing; Ansel et al. (2004) Pharmaceutical Dosage Forms and Drug Delivery Systems, 7^{th} ed., Lippencott Williams and Wilkins; Kibbe et al. (2000) Handbook of Pharmaceutical Excipients, 3^{rd} ed., Pharmaceutical Press.)

[0209] Suitable pharmaceutically acceptable carriers typically comprise substances that are relatively inert and can facilitate administration of the sensitized lymphocyte or host cell or can aid processing of the same into preparations that are pharmaceutically optimized for delivery to the site of action. Such pharmaceutically acceptable carriers include agents that can alter the form, consistency, viscosity, pH, tonicity, stability, osmolarity, pharmacokinetics, protein aggregation or solubility of the formulation and include buffering agents, wetting agents, emulsifying agents, diluents, encapsulating agents and skin penetration enhancers. Certain non-limiting examples of carriers include saline, buffered saline, dextrose, arginine, sucrose, water, glycerol, ethanol, sorbitol, dextran, sodium carboxymethyl cellulose and combinations thereof. Sensitized lymphocytes for systemic administration may be formulated for enteral, parenteral or topical administration. Indeed, all three types of formulation may be used simultaneously to achieve systemic administration of the active ingredient. Excipients as well as formulations for parenteral and nonparenteral drug delivery are well known in the art.

[0210] Formulations suitable for parenteral administration of DLL3 sensitized lymphocytes (e.g., by injection or infusion), include aqueous or non-aqueous, isotonic, pyrogen-free, sterile liquids (e.g., solutions, suspensions), in which the active ingredient is dissolved, suspended, or otherwise provided (e.g., in a liposome or other microparticulate). Such liquids may additionally contain other pharmaceutically acceptable carriers, such as anti-oxidants, buffers, preservatives, stabilizers, bacteriostats, suspending agents, thickening agents, and solutes that render the formulation isotonic with the blood (or other relevant bodily fluid) of the intended recipient. Examples of excipients include, for example, water, alcohols, polyols, glycerol, vegetable oils, and the like. Examples of suitable isotonic pharmaceutically acceptable carriers for use in such formulations include sodium chloride injection, Ringer's Solution, or Lactated Ringer's Injection.

[0211] Methods of introducing cellular components are also known in the art and include procedures such as those exemplified in U.S.P.Ns. 4,844,893 and 4,690,915. The amount of DLL3 sensitized lymphocytes (e.g., T cells or NK cells) used can vary between in vitro and in vivo uses, as well as with the amount and type of the target cells. The amount administered will also vary depending on the condition of the patient and should be determined by the practitioner after considering all appropriate factors.

[0212] The particular dosage regimen of DLL3 sensitized lymphocytes, i.e., dose, timing and repetition, will depend on the particular individual, as well as empirical considerations such as pharmacokinetics (e.g., half-life, clearance rate, etc.). For example, individuals may be given incremental dosages of sensitized lymphocytes produced as described herein. In selected embodiments the dosage may be gradually increased or reduced or attenuated based respectively on empirically determined or observed side effects or toxicity. Determination of the frequency of administration may be made by persons skilled in the art, such as an attending physician based on considerations of the condition and severity of the condition being treated, age and general state of health of the subject being treated and the like. Frequency of administration may be adjusted over the course of therapy based on assessment of the efficacy of the selected composition and the dosing regimen. Such assessment can be made on the basis of markers of the specific disease, disorder or condition. In embodiments where the individual has cancer, these include direct measurements of tumor size via palpation or visual observation; indirect measurement of tumor size by x-ray or other imaging techniques; an improvement as assessed by direct tumor biopsy and microscopic examination of a tumor sample; the measurement of an indirect tumor marker (e.g., DLL3 for SCLC) or an antigen identified according to the methods described herein; reduction in the number of proliferative or tumorigenic cells, maintenance of the reduction of such neoplastic cells; reduction of the proliferation of neoplastic cells; or delay in the development of metastasis.

[0213] In view of the instant disclosure the DLL3 CAR may be administered on a specific schedule. Generally, an effective dose of the sensitized lymphocytes is administered to a subject one or more times. More particularly, an effective dose of the DLL3 CAR is administered to the subject once a month, more than once a month, or less than once a month. In certain embodiments, the effective dose of the DLL3 sensitized lymphocytes may be administered multiple times, including for periods of at least a month, at least six months, at least a year, at least two years or a period of several years. In yet other embodiments, several days (2, 3, 4, 5, 6 or 7), several weeks (1, 2, 3, 4, 5, 6, 7 or 8) or several months (1, 2, 3, 4, 5, 6, 7 or 8) or even a year or several years may lapse between administration of the DLL3 sensitized lymphocytes.

[0214] In certain preferred embodiments the course of treatment involving DLL3 CAR will comprise multiple doses of the selected sensitized lymphocytes over a period of weeks or months. More specifically, DLL3 sensitized lymphocytes of the instant invention may administered once every day, every two days, every four days, every week, every ten days, every two weeks, every three weeks, every month, every six weeks, every two months, every ten weeks or every three months. In this regard it will be appreciated that the dosages may be altered or the interval may be adjusted based on patient response and clinical practices.

[0215] A typical amount of host cells administered to a mammal (e.g., a human) can be, for example, in the range of one million to 100 billion cells; however, amounts below or above this exemplary range are within the scope of the invention. For example, the daily dose of inventive host cells can be about 1 million to about 50 billion cells (e.g., about 5 million cells, about 25 million cells, about 500 million cells, about 1 billion cells, about 5 billion cells, about 20 billion cells, about 30 billion cells, about 40 billion cells, or a range defined by any two of the foregoing values), preferably about 10 million to about 100 billion cells (e.g., about 20 million cells, about million cells, about 40 million cells, about 60 million cells, about 70 million cells, about 80 million cells, about 90 million cells, about 10 billion cells, about 25 billion cells, about 50 billion cells, about 75 billion cells, about 90 billion cells, or a range defined by any two of the foregoing values), more preferably about 100 million cells to about 50 billion cells (e.g., about 120 million cells, about 250 million cells, about 350 million cells, about 450 million cells, about 650 million cells, about 800 million cells, about 900 million cells, about 3 billion cells, about 30 billion cells, about 45 billion cells, or a range defined by any two of the foregoing values). In preferred embodiments about 0.5 billion, 1.0 billion, 1.5 billion, 2 billion, 2.5 billion, 3 billion, 3.5 billion. 4 billion, 4.5 billion, 5 billion, 5.5 billion, 6 billion, 6.5 billion, 7 billion, 7.5 billion, 8 billion, 8.5 billion, 9 billion, 9.5 billion or 10 billion cells are administered to the patient in one or more doses.

[0216] Therapeutic or prophylactic efficacy can be monitored by periodic assessment of treated patients. For repeated administrations over several days or longer, depending on the condition, the treatment is repeated until a desired suppression of disease symptoms occurs. However, other dosage regimens may be useful and are within the scope of the invention. The desired dosage can be delivered by a single bolus administration of the composition, by multiple bolus administrations of the composition, or by continuous infusion administration of the composition.

[0217] As discussed above compositions comprising sensitized the host cells expressing the DLL3 CAR can be administered to a mammal using standard administration techniques, including intravenous, intraperitoneal, subcutaneous, pulmonary, transdermal, intramuscular or intranasal. The composition preferably is suitable for parenteral administration. The term “parenteral,” as used herein, includes intravenous, intramuscular, subcutaneous, rectal, vaginal, and intraperitoneal administration. More preferably, the composition is administered to a mammal using peripheral systemic delivery by intravenous, intraperitoneal, or subcutaneous injection.

[0218] Moreover host cells expressing the DLL3 CAR nucleic acid sequence, or a vector comprising the CAR-encoding nucleic acid sequence, can be administered with one or more additional therapeutic agents, which can be coadministered to the mammal. By “coadministering” is meant administering one or more additional therapeutic agents and the composition comprising the inventive host cells or the inventive vector sufficiently close in time such that the DLL3 CAR can enhance the effect of one or more additional therapeutic agents, or vice versa. In this regard, the composition comprising the sensitized lymphocytes can be administered first, and the one or more additional therapeutic agents can be administered second, or vice versa. Alternatively, the composition comprising the DLL3 sensitized lymphocytes and the one or more additional therapeutic agents can be administered simultaneously.

[0219] In selected preferred embodiments the DLL3 sensitized lymphocytes will be administered in conjunction with lymphotoxic therapies to increase the availability of homeostatic cytokines (e.g., IL-7, IL-15, etc.) to support T cell expansion. In such protocols the lymphotoxic therapy will preferably be conducted prior to administration of the sensitized lymphocytes. More specifically it is believed that a lymphodepleting preparative regimen may enhance the efficacy of adoptive cell therapy by reducing endogenous lymphocytes thereby leading to the accumulation of homeostatic cytokines that support expansion and persistence of the administered sensitized lymphocytes. Further, such preparative treatments may lead to a transient reduction in the number and frequency of Tregs thereby diminishing lymphocyte suppression and an induction of gut damage which may lead to the systemic release of bacterial byproducts (e.g., lipopolysaccharides) that activate the innate immune system. Taken together such mechanisms can substantially enhance the receptiveness of the immune environment for the transplanted DLL3 sensitized lymphocytes thereby promoting expansion and persistence of the same.

### VIII. Indications

[0220] The present invention preferably provides for the use of DLL3 sensitized lymphocytes for the treatment, maintenance and/or prophylaxis of various disorders including neoplastic, inflammatory, angiogenic and immunologic DLL3 associated disorders. Preferred targets for treatment are neoplastic conditions comprising solid tumors and hematologic malignancies. In certain embodiments the DLL3 CAR treatments of the invention will be used to inhibit, reduce or eliminate tumors or tumorigenic cells expressing DLL3. In selected aspects the disclosed compositions may be used to inhibit tumor cell proliferation. Preferably the “subject” or “patient” to be treated will be human although, as used herein, the terms are expressly held to comprise any mammalian species.

[0221] Neoplastic conditions subject to treatment in accordance with the instant invention may be benign or malignant; solid tumors or other blood neoplasia; and may be selected from the group including, but not limited to: adrenal gland tumors, AIDS-associated cancers, alveolar soft part sarcoma, astrocytic tumors, autonomic ganglia tumors, bladder cancer (squamous cell carcinoma and transitional cell carcinoma), blastocoelic disorders, bone cancer (adamantinoma, aneurismal bone cysts, osteochondroma, osteosarcoma), brain and spinal cord cancers, metastatic brain tumors, breast cancer including triple negative breast cancer, carotid body tumors, cervical cancer, chondrosarcoma, chordoma, chromophobe renal cell carcinoma, clear cell carcinoma, colon cancer, colorectal cancer, cutaneous benign fibrous histiocytomas, desmoplastic small round cell tumors, ependymomas, epithelial disorders, Ewing's tumors, extraskeletal myxoid chondrosarcoma, fibrogenesis imperfecta ossium, fibrous dysplasia of the bone, gallbladder and bile duct cancers, gastric cancer, gastrointestinal, gestational trophoblastic disease, germ cell tumors, glandular disorders, head and neck cancers, hypothalamic, intestinal cancer, islet cell tumors, Kaposi's Sarcoma, kidney cancer (nephroblastoma, papillary renal cell carcinoma), leukemias, lipoma/benign lipomatous tumors, liposarcoma/malignant lipomatous tumors, liver cancer (hepatoblastoma, hepatocellular carcinoma), lymphomas, lung cancers (small cell carcinoma, adenocarcinoma, squamous cell carcinoma, large cell carcinoma etc.), macrophagal disorders, medulloblastoma, melanoma, meningiomas, multiple endocrine neoplasia, multiple myeloma, myelodysplastic syndrome, neuroblastoma, neuroendocrine tumors, ovarian cancer, pancreatic cancers, papillary thyroid carcinomas, parathyroid tumors, pediatric cancers, peripheral nerve sheath tumors, phaeochromocytoma, pituitary tumors, prostate cancer, posterious unveal melanoma, rare hematologic disorders, renal metastatic cancer, rhabdoid tumor, rhabdomysarcoma, sarcomas, skin cancer, soft-tissue sarcomas, squamous cell cancer, stomach cancer, stromal disorders, synovial sarcoma, testicular cancer, thymic carcinoma, thymoma, thyroid metastatic cancer, and uterine cancers (carcinoma of the cervix, endometrial carcinoma, and leiomyoma).

[0222] In certain embodiments the compounds and compositions of the instant invention will be used as a front line therapy and administered to subjects who have not previously been treated for the cancerous condition. In other embodiments the compounds and compositions of the present invention will be used to treat subjects that have previously been treated (with compositions of the present invention or with other anti-cancer agents) and have relapsed or determined to be refractory to the previous treatment. In selected embodiments the compounds and compositions of the instant invention may be used to treat subjects that have recurrent tumors.

[0223] In selected aspects the proliferative disorder will comprise a solid tumor including, but not limited to, adrenal, liver, kidney, bladder, breast, gastric, ovarian, cervical, uterine, esophageal, colorectal, prostate, pancreatic, lung (both small cell and non-small cell), thyroid, carcinomas, sarcomas, glioblastomas and various head and neck tumors.

[0224] In other preferred embodiments the compounds or compositions will be administered to a subject suffering from melanoma. More generally the compositions and methods disclosed herein may be used to diagnose, monitor, treat or prevent melanoma. The term “melanoma”, as used herein, includes all types of melanoma including, but not limited to, primary melanoma, malignant melanoma, cutaneous melanoma, extracutaneous melanoma, superficial spreading melanoma, polypoid melanoma, melanocarcinomas, melanoepitheliomas, melanosarcomas, melanoma in situ, nodular malignant melanoma, lentigo maligna melanoma, lentiginous melanoma, lentiginous malignant melanoma, mucosal lentiginous melanoma, mucosal melanoma, acral lentiginous melanoma, soft tissue melanoma, ocular melanoma, invasive melanoma, familial atypical mole and melanoma (FAM-M) syndrome, desmoplastic malignant melanoma or uveal melanoma.

[0225] In selected aspects the disclosed DLL3 CAR treatments are especially effective at treating lung cancer, including the following subtypes: small cell lung cancer, non-small cell lung cancer (e.g. squamous cell non-small cell lung cancer or squamous cell small cell lung cancer) and large cell neuroendocrine carcinoma (LCNEC). In selected embodiments the DLL3 sensitive lymphocytes can be administered to patients exhibiting limited stage disease or extensive stage disease. In other preferred embodiments the disclosed conjugated antibodies will be administered to refractory patients (i.e., those whose disease recurs during or shortly after completing a course of initial therapy); sensitive patients (i.e., those whose relapse is longer than 2-3 months after primary therapy); or patients exhibiting resistance to a platinum based agent (e.g. carboplatin, cisplatin, oxaliplatin) and/or a taxane (e.g. docetaxel, paclitaxel, larotaxel or cabazitaxel).

[0226] In another particularly preferred embodiment the disclosed DLL3 CAR treatments are effective at treating ovarian cancer, including ovarian-serous carcinoma and ovarian-papillary serous carcinoma.

[0227] The disclosed compositions may further be used to prevent, treat or diagnose tumors with neuroendocrine features or phenotypes including neuroendocrine tumors. True or canonical neuroendocrine tumors (NETs) arising from the dispersed endocrine system are relatively rare, with an incidence of 2-5 per 100,000 people, but highly aggressive. Neuroendocrine tumors occur in the kidney, genitourinary tract (bladder, prostate, ovary, cervix, and endometrium), gastrointestinal tract (colon, stomach), thyroid (medullary thyroid cancer), and lung (small cell lung carcinoma and large cell neuroendocrine carcinoma). These tumors may secrete several hormones including serotonin and/or chromogranin A that can cause debilitating symptoms known as carcinoid syndrome. Such tumors can be denoted by positive immunohistochemical markers such as neuron-specific enolase (NSE, also known as gamma enolase, gene symbol=ENO2), CD56 (or NCAM1), chromogranin A (CHGA), and synaptophysin (SYP) or by genes known to exhibit elevated expression such as ASCL1. Unfortunately traditional chemotherapies have not been particularly effective in treating NETs and liver metastasis is a common outcome.

[0228] While the disclosed compositions may be advantageously used to treat neuroendocrine tumors they may also be used to treat, prevent or diagnose pseudo neuroendocrine tumors (pNETs) that genotypically or phenotypically mimic, resemble or exhibit common traits with canonical neuroendocrine tumors. Pseudo neuroendocrine tumors or tumors with neuroendocrine features are tumors that arise from cells of the diffuse neuroendocrine system or from cells in which a neuroendocrine differentiation cascade has been aberrantly reactivated during the oncogenic process. Such pNETs commonly share certain phenotypic or biochemical characteristics with traditionally defined neuroendocrine tumors, including the ability to produce subsets of biologically active amines, neurotransmitters, and peptide hormones. Histologically, such tumors (NETs and pNETs) share a common appearance often showing densely connected small cells with minimal cytoplasm of bland cytopathology and round to oval stippled nuclei. For the purposes of the instant invention commonly expressed histological markers or genetic markers that may be used to define neuroendocrine and pseudo neuroendocrine tumors include, but are not limited to, chromogranin A, CD56, synaptophysin, PGP9.5, ASCL1 and neuron-specific enolase (NSE).

[0229] Accordingly the sensitized lymphocytes of the instant invention may beneficially be used to treat both pseudo neuroendocrine tumors and canonical neuroendocrine tumors. In this regard the ADCs may be used as described herein to treat neuroendocrine tumors (both NET and pNET) arising in the kidney, genitourinary tract (bladder, prostate, ovary, cervix, and endometrium), gastrointestinal tract (colon, stomach), thyroid (medullary thyroid cancer), and lung (small cell lung carcinoma and large cell neuroendocrine carcinoma). Moreover, the compositions of the instant invention may be used to treat tumors expressing one or more markers selected from the group consisting of NSE, CD56, synaptophysin, chromogranin A, ASCL1 and PGP9.5 (UCHL1). That is, the present invention may be used to treat a subject suffering from a tumor that is NSE⁺ or CD56⁺ or PGP9.5⁺ or ASCL1⁺ or SYP⁺ or CHGA⁺ or some combination thereof.

[0230] In another preferred embodiment the DLL3 CAR treatments of the instant invention may be used in maintenance therapy to reduce or eliminate the chance of tumor recurrence following the initial presentation of the disease. Preferably the disorder will have been treated and the initial tumor mass eliminated, reduced or otherwise ameliorated so the patient is asymptomatic or in remission. At such time the subject may be administered pharmaceutically effective amounts of the disclosed DLL3 CAR treatments one or more times even though there is little or no indication of disease using standard diagnostic procedures. In some embodiments, the modulators will be administered on a regular schedule over a period of time, such as weekly, every two weeks, monthly, every six weeks, every two months, every three months every six months or annually. Given the teachings herein, one skilled in the art could readily determine favorable dosages and dosing regimens to reduce the potential of disease recurrence. Moreover such treatments could be continued for a period of weeks, months, years or even indefinitely depending on the patient response and clinical and diagnostic parameters.

[0231] In yet another preferred embodiment the DLL3 CAR treatments of the present invention may be used to prophylactically or as an adjuvant therapy to prevent or reduce the possibility of tumor metastasis following a debulking procedure. As used in the instant disclosure a “debulking procedure” is defined broadly and shall mean any procedure, technique or method that eliminates, reduces, treats or ameliorates a tumor or tumor proliferation. Exemplary debulking procedures include, but are not limited to, surgery, radiation treatments (i.e., beam radiation), chemotherapy, immunotherapy or ablation. At appropriate times readily determined by one skilled in the art in view of the instant disclosure the disclosed DLL3 CAR treatments may be administered as suggested by clinical, diagnostic or theragnostic procedures to reduce tumor metastasis. The DLL3 sensitized lymphocytes may be administered one or more times at pharmaceutically effective dosages as determined using standard techniques. Preferably the dosing regimen will be accompanied by appropriate diagnostic or monitoring techniques that allow it to be modified.

[0232] Yet other embodiments of the invention comprise administering the disclosed DLL3 CAR treatments to subjects that are asymptomatic but at risk of developing a proliferative disorder. That is, the DLL3 CAR treatments of the instant invention may be used in a truly preventative sense and given to patients that have been examined or tested and have one or more noted risk factors (e.g., genomic indications, family history, in vivo or in vitro test results, etc.) but have not developed neoplasia. In such cases those skilled in the art would be able to determine an effective dosing regimen through empirical observation or through accepted clinical practices.

### IX. Combination Therapies

[0233] As previously discussed it will be appreciated that the DLL3 CAR treatments described herein may be used in combination with other clinical oncology treatments. In general the treatments of the instant invention may be used with a therapeutic moiety or a drug such as an anti-cancer agent including, but not limited to, cytotoxic agents, cytostatic agents, anti-angiogenic agents, debulking agents, chemotherapeutic agents, radiotherapeutic agents, targeted anti-cancer agents, biological response modifiers, cancer vaccines, cytokines, hormone therapies, anti-metastatic agents and immunotherapeutic agents.

[0234] Combination therapies may be useful in preventing or treating cancer and in preventing metastasis or recurrence of cancer. “Combination therapy”, as used herein, means the administration of a combination comprising at least one DLL3 CAR treatment and at least one therapeutic moiety (e.g., anti-cancer agent) wherein the combination preferably has therapeutic synergy or improves the measurable therapeutic effects in the treatment of cancer over (i) the DLL3 CAR treatment used alone, or (ii) the therapeutic moiety used alone, or (iii) the use of the therapeutic moiety in combination with another therapeutic moiety without the addition of DLL3 CAR treatment. The terms “therapeutic synergy” or “synergy”, as used herein, means the combination of an DLL3 CAR treatment and one or more therapeutic moiety(ies) having a therapeutic effect greater than the additive effect of the combination of the DLL3 CAR treatment and the one or more therapeutic moiety(ies).

[0235] Desired outcomes of the disclosed combinations are quantified by comparison to a control or baseline measurement. As used herein, relative terms such as “improve,” “increase,” or “reduce” indicate values relative to a control, such as a measurement in the same individual prior to initiation of treatment described herein, or a measurement in a control individual (or multiple control individuals) in the absence of DLL3 CAR treatments described herein but in the presence of other therapeutic moiety(ies) such as standard of care treatment. A representative control individual is an individual afflicted with the same form of cancer as the individual being treated, who is about the same age as the individual being treated (to ensure that the stages of the disease in the treated individual and the control individual are comparable.)

[0236] Changes or improvements in response to therapy are generally statistically significant. As used herein, the term “significance” or “significant” relates to a statistical analysis of the probability that there is a non-random association between two or more entities. To determine whether or not a relationship is “significant” or has “significance,” a “p-value” can be calculated. P-values that fall below a user-defined cut-off point are regarded as significant. A p-value less than or equal to 0.1, less than 0.05, less than 0.01, less than 0.005, or less than 0.001 may be regarded as significant.

[0237] A synergistic therapeutic effect may be an effect of at least about two-fold greater than the therapeutic effect elicited by a single therapeutic moiety or DLL3 CAR treatment, or the sum of the therapeutic effects elicited by the DLL3 CAR treatment or the single therapeutic moiety(ies) of a given combination, or at least about five-fold greater, or at least about ten-fold greater, or at least about twenty-fold greater, or at least about fifty-fold greater, or at least about one hundred-fold greater. A synergistic therapeutic effect may also be observed as an increase in therapeutic effect of at least 10% compared to the therapeutic effect elicited by a single therapeutic moiety or DLL3 CAR treatment or the sum of the therapeutic effects elicited by the DLL3 CAR treatment or the single therapeutic moiety(ies) of a given combination, or at least 20%, or at least 30%, or at least 40%, or at least 50%, or at least 60%, or at least 70%, or at least 80%, or at least 90%, or at least 100%, or more. A synergistic effect is also an effect that permits reduced dosing of therapeutic agents when they are used in combination.

[0238] In practicing combination therapy, the DLL3 CAR treatment and therapeutic moiety(ies) may be administered to the subject simultaneously, either in a single composition, or as two or more distinct compositions using the same or different administration routes. Alternatively, treatment with the DLL3 CAR treatment may precede or follow the therapeutic moiety treatment by, e.g., intervals ranging from minutes to weeks. In one embodiment, both the CAR therapeutic moiety and the antibody or ADC are administered within about 5 minutes to about two weeks of each other. In yet other embodiments, several days (2, 3, 4, 5, 6 or 7), several weeks (1, 2, 3, 4, 5, 6, 7 or 8) or several months (1, 2, 3, 4, 5, 6, 7 or 8) may lapse between administration of the antibody and the therapeutic moiety.

[0239] The combination therapy can be administered until the condition is treated, palliated or cured on various schedules such as once, twice or three times daily, once every two days, once every three days, once weekly, once every two weeks, once every month, once every two months, once every three months, once every six months, or may be administered continuously. The antibody and therapeutic moiety(ies) may be administered on alternate days or weeks; or a sequence of DLL3 CAR treatments may be given, followed by one or more treatments with the additional therapeutic moiety. In one embodiment an DLL3 CAR is administered in combination with one or more therapeutic moiety(ies) for short treatment cycles. In other embodiments the combination treatment is administered for long treatment cycles. The combination therapy can be administered via any route.

[0240] In selected embodiments the compounds and compositions of the present invention may be used in conjunction with checkpoint inhibitors such as PD-1 inhibitors or PD-L1 inhibitors. PD-1, together with its ligand PD-L1, are negative regulators of the antitumor T lymphocyte response. In one embodiment the combination therapy may comprise the administration of DLL3 sensitized lymphocytes together with an anti-PD-1 antibody (e.g. pembrolizumab, nivolumab, pidilizumab) and optionally one or more other therapeutic moiety(ies). In another embodiment the combination therapy may comprise the administration of DLL3 sensitized lymphocytes together with an anti-PD-L1 antibody (e.g. avelumab, atezolizumab, durvalumab) and optionally one or more other therapeutic moiety(ies). In yet another embodiment, the combination therapy may comprise the administration of DLL3 sensitized lymphocytes together with an anti PD-1 antibody or anti-PD-L1 administered to patients who continue progress following treatments with checkpoint inhibitors and/or targeted BRAF combination therapies (e.g., ipilimumab and vemurafenib or dabrafinib).

[0241] In some embodiments the sensitized lymphocytes may be used in combination with various first line cancer treatments. In one embodiment the combination therapy comprises the use of the compositions of the instant invention and a cytotoxic agent such as ifosfamide, mytomycin C, vindesine, vinblastine, etoposide, ironitecan, gemcitabine, taxanes, vinorelbine, methotrexate, and pemetrexed) and optionally one or more other therapeutic moiety(ies).

[0242] In another embodiment the combination therapy comprises the use of an DLL3 CAR treatment and a platinum-based drug (e.g. carboplatin or cisplatin) and optionally one or more other therapeutic moiety(ies) (e.g. vinorelbine; gemcitabine; a taxane such as, for example, docetaxel or paclitaxel; irinotican; or pemetrexed).

[0243] In one embodiment, for example, in the treatment of BR-ERPR, BR-ER or BR-PR cancer, the combination therapy comprises the use of an DLL3 CAR treatment and one or more therapeutic moieties described as “hormone therapy”. “Hormone therapy” as used herein, refers to, e.g., tamoxifen; gonadotropin or luteinizing releasing hormone (GnRH or LHRH); everolimus and exemestane; toremifene; or aromatase inhibitors (e.g. anastrozole, letrozole, exemestane or fulvestrant).

[0244] In another embodiment, for example, in the treatment of BR-HER2, the combination therapy comprises the use of an DLL3 CAR treatment and trastuzumab or ado-trastuzumab emtansine and optionally one or more other therapeutic moiety(ies) (e.g. pertuzumab and/or docetaxel).

[0245] In some embodiments, for example, in the treatment of metastatic breast cancer, the combination therapy comprises the use of an DLL3 CAR treatment and a taxane (e.g. docetaxel or paclitaxel) and optionally an additional therapeutic moiety(ies), for example, an anthracycline (e.g. doxorubicin or epirubicin) and/or eribulin.

[0246] In another embodiment, for example, in the treatment of metastatic or recurrent breast cancer or BRCA-mutant breast cancer, the combination therapy comprises the use of an DLL3 CAR treatment and megestrol and optionally an additional therapeutic moiety(ies).

[0247] In further embodiments, for example, in the treatment of BR-TNBC, the combination therapy comprises the use of an DLL3 CAR treatment and a poly ADP ribose polymerase (PARP) inhibitor (e.g. BMN-673, olaparib, rucaparib and veliparib) and optionally an additional therapeutic moiety(ies).

[0248] In another embodiment, for example, in the treatment of breast cancer, the combination therapy comprises the use of an DLL3 CAR treatment and cyclophosphamide and optionally an additional therapeutic moiety(ies) (e.g. doxorubicin, a taxane, epirubicin, 5-FU and/or methotrexate.

[0249] In another embodiment combination therapy for the treatment of EGFR-positive NSCLC comprises the use of an DLL3 CAR treatment and afatinib and optionally one or more other therapeutic moiety(ies) (e.g. erlotinib and/or bevacizumab).

[0250] In another embodiment combination therapy for the treatment of EGFR-positive NSCLC comprises the use of an DLL3 CAR treatment and erlotinib and optionally one or more other therapeutic moiety(ies) (e.g. bevacizumab).

[0251] In another embodiment combination therapy for the treatment of ALK-positive NSCLC comprises the use of an DLL3 CAR treatment and ceritinib and optionally one or more other therapeutic moiety(ies).

[0252] In another embodiment combination therapy for the treatment of ALK-positive NSCLC comprises the use of an DLL3 CAR treatment and crizotinib and optionally one or more other therapeutic moiety(ies).

[0253] In another embodiment the combination therapy comprises the use of an DLL3 CAR treatment and bevacizumab and optionally one or more other therapeutic moiety(ies) (e.g. a taxane such as, for example, docetaxel or paclitaxel; and/or a platinum analog).

[0254] In another embodiment the combination therapy comprises the use of an DLL3 CAR treatment and bevacizumab and optionally one or more other therapeutic moiety(ies) (e.g. gemcitabine and/or a platinum analog).

[0255] In one embodiment the combination therapy comprises the use of an DLL3 CAR treatment and a platinum-based drug (e.g. carboplatin or cisplatin) analog and optionally one or more other therapeutic moiety(ies) (e.g. a taxane such as, for example, docetaxel and paclitaxel).

[0256] In one embodiment the combination therapy comprises the use of an DLL3 CAR treatment and platinum-based drug (e.g. carboplatin or cisplatin) analog and optionally one or more other therapeutic moiety(ies) (e.g. a taxane such, for example, docetaxel and paclitaxel and/or gemcitabine and/or doxorubicin).

[0257] In a particular embodiment the combination therapy for the treatment of platinum-resistant tumors comprises the use of a DLL3 CAR treatment and doxorubicin and/or etoposide and/or gemcitabine and/or vinorelbine and/or ifosfamide and/or leucovorin-modulated 5-fluoroucil and/or bevacizumab and/or tamoxifen; and optionally one or more other therapeutic moiety(ies).

[0258] In another embodiment the combination therapy comprises the use of a DLL3 CAR treatment and a PARP inhibitor and optionally one or more other therapeutic moiety(ies).

[0259] In another embodiment the combination therapy comprises the use of an DLL3 CAR treatment and bevacizumab and optionally cyclophosphamide.

[0260] The combination therapy may comprise a DLL3 CAR treatment and a chemotherapeutic moiety that is effective on a tumor comprising a mutated or aberrantly expressed gene or protein (e.g. BRCA1).

[0261] More generally the DLL3 CAR treatments of the instant invention may be used in combination with a number of anti-cancer agents. The term “anti-cancer agent” or “chemotherapeutic agent” as used herein is one subset of “therapeutic moieties”, which in turn is a subset of the agents described as “pharmaceutically active moieties”. More particularly “anti-cancer agent” means any agent that can be used to treat a cell proliferative disorder such as cancer, and includes, but is not limited to, cytotoxic agents, cytostatic agents, anti-angiogenic agents, debulking agents, chemotherapeutic agents, radiotherapy and radiotherapeutic agents, targeted anti-cancer agents, biological response modifiers, therapeutic antibodies, cancer vaccines, cytokines, hormone therapy, anti-metastatic agents and immunotherapeutic agents. It will be appreciated that in selected embodiments as discussed above, such anti-cancer agents may comprise antibody drug conjugates and may be associated with antibodies prior to administration.

[0262] The term “cytotoxic agent”, which can also be an anti-cancer agent means a substance that is toxic to the cells and decreases or inhibits the function of cells and/or causes destruction of cells. Typically, the substance is a naturally occurring molecule derived from a living organism (or a synthetically prepared natural product). Examples of cytotoxic agents include, but are not limited to, small molecule toxins or enzymatically active toxins of bacteria (e.g., Diptheria toxin, Pseudomonas endotoxin and exotoxin, Staphylococcal enterotoxin A), fungal (e.g., α-sarcin, restrictocin), plants (e.g., abrin, ricin, modeccin, viscumin, pokeweed anti-viral protein, saporin, gelonin, momoridin, trichosanthin, barley toxin, Aleurites fordii proteins, dianthin proteins, Phytolacca mericana proteins (PAPI, PAPII, and PAP-S), Momordica charantia inhibitor, curcin, crotin, saponaria officinalis inhibitor, mitegellin, restrictocin, phenomycin, neomycin, and the tricothecenes) or animals, (e.g., cytotoxic RNases, such as extracellular pancreatic RNases; DNase I, including fragments and/or variants thereof).

[0263] An anti-cancer agent can include any chemical agent that inhibits, or is designed to inhibit, a cancerous cell or a cell likely to become cancerous or generate tumorigenic progeny (e.g., tumorigenic cells). Such chemical agents are often directed to intracellular processes necessary for cell growth or division, and are thus particularly effective against cancerous cells, which generally grow and divide rapidly. For example, vincristine depolymerizes microtubules, and thus inhibits cells from entering mitosis. Such agents are often administered, and are often most effective, in combination, e.g., in the formulation CHOP.

[0264] Examples of anti-cancer agents that may be used in combination with DLL3 CAR treatment of the invention include, but are not limited to, alkylating agents, alkyl sulfonates, anastrozole, amanitins, aziridines, ethylenimines and methylamelamines, acetogenins, a camptothecin, BEZ-235, bortezomib, bryostatin, callystatin, CC-1065, ceritinib, crizotinib, cryptophycins, dolastatin, duocarmycin, eleutherobin, erlotinib, pancratistatin, a sarcodictyin, spongistatin, nitrogen mustards, antibiotics, enediyne dynemicin, bisphosphonates, esperamicin, chromoprotein enediyne antiobiotic chromophores, aclacinomysins, actinomycin, authramycin, azaserine, bleomycins, cactinomycin, canfosfamide, carabicin, carminomycin, carzinophilin, chromomycinis, cyclosphosphamide, dactinomycin, daunorubicin, detorubicin, 6-diazo-5-oxo-L-norleucine, doxorubicin, epirubicin, esorubicin, exemestane, fluorouracil, fulvestrant, gefitinib, idarubicin, lapatinib, letrozole, lonafamib, marcellomycin, megestrol acetate, mitomycins, mycophenolic acid, nogalamycin, olivomycins, pazopanib, peplomycin, potfiromycin, puromycin, quelamycin, rapamycin, rodorubicin, sorafenib, streptonigrin, streptozocin, tamoxifen, tamoxifen citrate, temozolomide, tepodina, tipifarnib, tubercidin, ubenimex, vandetanib, vorozole, XL-147, zinostatin, zorubicin; anti-metabolites, folic acid analogues, purine analogs, androgens, anti-adrenals, folic acid replenisher such as frolinic acid, aceglatone, aldophosphamide glycoside, aminolevulinic acid, eniluracil, amsacrine, bestrabucil, bisantrene, edatraxate, defofamine, demecolcine, diaziquone, elfornithine, elliptinium acetate, epothilone, etoglucid, gallium nitrate, hydroxyurea, lentinan, lonidainine, maytansinoids, mitoguazone, mitoxantrone, mopidanmol, nitraerine, pentostatin, phenamet, pirarubicin, losoxantrone, podophyllinic acid, 2-ethylhydrazide, procarbazine, polysaccharide complex, razoxane; rhizoxin; SF-1126, sizofiran; spirogermanium; tenuazonic acid; triaziquone; 2,2′,2″-trichlorotriethylamine; trichothecenes (T-2 toxin, verracurin A, roridin A and anguidine); urethan; vindesine; dacarbazine; mannomustine; mitobronitol; mitolactol; pipobroman; gacytosine; arabinoside; cyclophosphamide; thiotepa; taxoids, chloranbucil; gemcitabine; 6-thioguanine; mercaptopurine; methotrexate; platinum analogs, vinbiastine; platinum; etoposide; ifosfamide; mitoxantrone; vincristine; vinorelbine; novantrone; teniposide; edatrexate; daunomycin; aminopterin; xeloda; ibandronate; irinotecan, topoisomerase inhibitor RFS 2000; difluorometlhylornithine; retinoids; capecitabine; combretastatin; leucovorin; oxaliplatin; XL518, inhibitors of PKC-alpha, Raf, H-Ras, EGFR and VEGF-A that reduce cell proliferation and pharmaceutically acceptable salts or solvates, acids or derivatives of any of the above. Also included in this definition are anti-hormonal agents that act to regulate or inhibit hormone action on tumors such as anti-estrogens and selective estrogen receptor antibodies, aromatase inhibitors that inhibit the enzyme aromatase, which regulates estrogen production in the adrenal glands, and anti-androgens; as well as troxacitabine (a 1,3-dioxolane nucleoside cytosine analog); antisense oligonucleotides, ribozymes such as a VEGF expression inhibitor and a HER2 expression inhibitor; vaccines, PROLEUKIN® rIL-2; LURTOTECAN® topoisomerase 1 inhibitor; ABARELIX® rmRH; Vinorelbine and Esperamicins and pharmaceutically acceptable salts or solvates, acids or derivatives of any of the above.

[0265] Particularly preferred anti-cancer agents comprise commercially or clinically available compounds such as erlotinib (TARCEVA®, Genentech/OSI Pharm.), docetaxel (TAXOTERE®, Sanofi-Aventis), 5-FU (fluorouracil, 5-fluorouracil, CAS No. 51-21-8), gemcitabine (GEMZAR®, Lilly), PD-0325901 (CAS No. 391210-10-9, Pfizer), cisplatin (cis-diamine, dichloroplatinum(II), CAS No. 15663-27-1), carboplatin (CAS No. 41575-94-4), paclitaxel (TAXOL®, Bristol-Myers Squibb Oncology, Princeton, N.J.), trastuzumab (HERCEPTIN®, Genentech), temozolomide (4-methyl-5-oxo-2,3,4,6,8-pentazabicyclo [4.3.0] nona-2,7,9-triene-9-carboxamide, CAS No. 85622-93-1, TEMODAR®, TEMODAL®, Schering Plough), tamoxifen ((Z)-2-[4-(1,2-diphenylbut-1-enyl)phenoxy]-N,N-dimethylethanamine, NOLVADEX®, ISTUBAL®, VALODEX®, and doxorubicin (ADRIAMYCIN®). Additional commercially or clinically available anti-cancer agents comprise oxaliplatin (ELOXATIN®, Sanofi), bortezomib (VELCADE®, Millennium Pharm.), sutent (SUNITINIB®, SU11248, Pfizer), letrozole (FEMARA®, Novartis), imatinib mesylate (GLEEVEC®, Novartis), XL-518 (Mek inhibitor, Exelixis, WO 2007/044515), ARRY-886 (Mek inhibitor, AZD6244, Array BioPharma, Astra Zeneca), SF-1126 (PI3K inhibitor, Semafore Pharmaceuticals), BEZ-235 (PI3K inhibitor, Novartis), XL-147 (PI3K inhibitor, Exelixis), PTK787/ZK 222584 (Novartis), fulvestrant (FASLODEX®, AstraZeneca), leucovorin (folinic acid), rapamycin (sirolimus, RAPAMUNE®, Wyeth), lapatinib (TYKERB®, GSK572016, Glaxo Smith Kline), lonafamib (SARASAR™, SCH 66336, Schering Plough), sorafenib (NEXAVAR®, BAY43-9006, Bayer Labs), gefitinib (IRESSA®, AstraZeneca), irinotecan (CAMPTOSAR®, CPT-11, Pfizer), tipifamib (ZARNESTRA™, Johnson & Johnson), ABRAXANE™ (Cremophor-free), albumin-engineered nanoparticle formulations of paclitaxel (American Pharmaceutical Partners, Schaumberg, II), vandetanib (rlNN, ZD6474, ZACTIMA®, AstraZeneca), chloranmbucil, AG1478, AG1571 (SU 5271; Sugen), temsirolimus (TORISEL®, Wyeth), pazopanib (GlaxoSmithKline), canfosfamide (TELCYTA®, Telik), thiotepa and cyclosphosphamide (CYTOXAN®, NEOSAR®); vinorelbine (NAVELBINE®); capecitabine (XELODA®, Roche), tamoxifen (including NOLVADEX®; tamoxifen citrate, FARESTON® (toremifine citrate) MEGASES (megestrol acetate), AROMASIN® (exemestane; Pfizer), formestanie, fadrozole, RIVISOR® (vorozole), FEMARA® (letrozole; Novartis), and ARIMIDEX® (anastrozole; AstraZeneca).

[0266] The term “pharmaceutically acceptable salt” or “salt” means organic or inorganic salts of a molecule or macromolecule. Acid addition salts can be formed with amino groups. Exemplary salts include, but are not limited, to sulfate, citrate, acetate, oxalate, chloride, bromide, iodide, nitrate, bisulfate, phosphate, acid phosphate, isonicotinate, lactate, salicylate, acid citrate, tartrate, oleate, tannate, pantothenate, bitartrate, ascorbate, succinate, maleate, gentisinate, fumarate, gluconate, glucuronate, saccharate, formate, benzoate, glutamate, methanesulfonate, ethanesulfonate, benzenesulfonate, p-toluenesulfonate, and pamoate (i.e., 1,1′ methylene bis-(2-hydroxy 3-naphthoate)) salts. A pharmaceutically acceptable salt may involve the inclusion of another molecule such as an acetate ion, a succinate ion or other counterion. The counterion may be any organic or inorganic moiety that stabilizes the charge on the parent compound. Furthermore, a pharmaceutically acceptable salt may have more than one charged atom in its structure. Where multiple charged atoms are part of the pharmaceutically acceptable salt, the salt can have multiple counter ions. Hence, a pharmaceutically acceptable salt can have one or more charged atoms and/or one or more counterion.

[0267] “Pharmaceutically acceptable solvate” or “solvate” refers to an association of one or more solvent molecules and a molecule or macromolecule. Examples of solvents that form pharmaceutically acceptable solvates include, but are not limited to, water, isopropanol, ethanol, methanol, DMSO, ethyl acetate, acetic acid, and ethanolamine.

[0268] In other embodiments the DLL3 CAR treatments of the instant invention may be used in combination with any one of a number of antibodies (or immunotherapeutic agents) presently in clinical trials or commercially available. The disclosed antibodies may be used in combination with an antibody selected from the group consisting of abagovomab, adecatumumab, afutuzumab, alemtuzumab, altumomab, amatuximab, anatumomab, arcitumomab, atezolizumab, avelumab, bavituximab, bectumomab, bevacizumab, bivatuzumab, blinatumomab, brentuximab, cantuzumab, catumaxomab, cetuximab, citatuzumab, cixutumumab, clivatuzumab, conatumumab, daratumumab, drozitumab, duligotumab, dusigitumab, detumomab, dacetuzumab, dalotuzumab, durvalumab, ecromeximab, elotuzumab, ensituximab, ertumaxomab, etaracizumab, farletuzumab, ficlatuzumab, figitumumab, flanvotumab, futuximab, ganitumab, gemtuzumab, girentuximab, glembatumumab, ibritumomab, igovomab, imgatuzumab, indatuximab, inotuzumab, intetumumab, ipilimumab, iratumumab, labetuzumab, lexatumumab, lintuzumab, lorvotuzumab, lucatumumab, mapatumumab, matuzumab, milatuzumab, minretumomab, mitumomab, moxetumomab, narnatumab, naptumomab, necitumumab, nimotuzumab, nivolumab, nofetumomabn, obinutuzumab, ocaratuzumab, ofatumumab, olaratumab, olaparib, onartuzumab, oportuzumab, oregovomab, panitumumab, parsatuzumab, patritumab, pembrolizumab, pemtumomab, pertuzumab, pidilizumab, pintumomab, pritumumab, racotumomab, radretumab, ramucirumab, rilotumumab, rituximab, robatumumab, satumomab, selumetinib, sibrotuzumab, siltuximab, simtuzumab, solitomab, tacatuzumab, taplitumomab, tenatumomab, teprotumumab, tigatuzumab, tositumomab, trastuzumab, tucotuzumab, ublituximab, veltuzumab, vorsetuzumab, votumumab, zalutumumab, CC49, 3F8, MDX-1105 and combinations thereof.

[0269] Other particularly preferred embodiments comprise the use of the disclosed compositions with antibodies approved for cancer therapy including, but not limited to, rituximab, gemtuzumab ozogamcin, alemtuzumab, ibritumomab tiuxetan, tositumomab, bevacizumab, cetuximab, patitumumab, ofatumumab, ipilimumab and brentuximab vedotin. Those skilled in the art will be able to readily identify additional anti-cancer agents that are compatible with the teachings herein.

[0270] The present invention also provides for the combination of the DLL3 CAR treatments with radiotherapy (i.e., any mechanism for inducing DNA damage locally within tumor cells such as gamma-irradiation, X-rays, UV-irradiation, microwaves, electronic emissions and the like). Combination therapy using the directed delivery of radioisotopes to tumor cells is also contemplated, and the disclosed DLL3 CAR treatments may be used in connection with a targeted anti-cancer agent or other targeting means. Typically, radiation therapy is administered in pulses over a period of time from about 1 to about 2 weeks. The radiation therapy may be administered to subjects having head and neck cancer for about 6 to 7 weeks. Optionally, the radiation therapy may be administered as a single dose or as multiple, sequential doses.

### X. Diagnostics

[0271] The invention provides in vitro and in vivo methods for detecting, diagnosing or monitoring the efficiency of any lymphocyte transduction or the effect of any DLL3 sensitized lymphocytes on tumor cells including tumorigenic cells. Such methods include identifying an individual having cancer (e.g., a DLL3 positive tumor) for treatment or monitoring progression of a cancer, comprising interrogating the patient or a sample obtained from a patient (either in vivo or in vitro) with an antibody as described herein before during or after treatment with DLL3 sensitized lymphocytes and detecting presence or absence, or level of association, of the antibody to bound or free target molecules in the sample. In some embodiments the DLL3 antibody will comprise a detectable label or reporter molecule as described herein. In yet other embodiments (e.g., In situ hybridization or ISH) a nucleic acid probe that reacts with a genomic DLL3 determinant will be used in the detection, diagnosis or monitoring of the proliferative disorder.

[0272] More generally the presence and/or levels of DLL3 determinants may be measured using any of a number of techniques available to the person of ordinary skill in the art for protein or nucleic acid analysis, e.g., direct physical measurements (e.g., mass spectrometry), binding assays (e.g., immunoassays, agglutination assays, and immunochromatographic assays), Polymerase Chain Reaction (PCR, RT-PCR; RT-qPCR) technology, branched oligonucleotide technology, Northern blot technology, oligonucleotide hybridization technology and in situ hybridization technology. The method may also comprise measuring a signal that results from a chemical reaction, e.g., a change in optical absorbance, a change in fluorescence, the generation of chemiluminescence or electrochemiluminescence, a change in reflectivity, refractive index or light scattering, the accumulation or release of detectable labels from the surface, the oxidation or reduction or redox species, an electrical current or potential, changes in magnetic fields, etc. Suitable detection techniques may detect binding events by measuring the participation of labeled binding reagents through the measurement of the labels via their photoluminescence (e.g., via measurement of fluorescence, time-resolved fluorescence, evanescent wave fluorescence, up-converting phosphors, multi-photon fluorescence, etc.), chemiluminescence, electrochemiluminescence, light scattering, optical absorbance, radioactivity, magnetic fields, enzymatic activity (e.g., by measuring enzyme activity through enzymatic reactions that cause changes in optical absorbance or fluorescence or cause the emission of chemiluminescence). Alternatively, detection techniques may be used that do not require the use of labels, e.g., techniques based on measuring mass (e.g., surface acoustic wave measurements), refractive index (e.g., surface plasmon resonance measurements), or the inherent luminescence of an analyte.

[0273] In some embodiments, the association of the detection agent with particular cells or cellular components in the sample indicates that the sample may contain tumorigenic cells, thereby denoting that the individual having cancer may be effectively treated with the compositions as described herein.

[0274] In certain preferred embodiments the assays may comprise immunohistochemistry (IHC) assays or variants thereof (e.g., fluorescent, chromogenic, standard ABC, standard LSAB, etc.), immunocytochemistry or variants thereof (e.g., direct, indirect, fluorescent, chromogenic, etc.) or In situ hybridization (ISH) or variants thereof (e.g., chromogenic in situ hybridization (CISH) or fluorescence in situ hybridization (DNA-FISH or RNA-FISH]))

[0275] In this regard certain aspects of the instant invention comprise the use of labeled DLL3 for immunohistochemistry (IHC). More particularly DLL3 IHC may be used as a diagnostic tool to aid in the diagnosis of various proliferative disorders and to monitor the potential response to treatments including DLL3 antibody therapy. As discussed herein and shown in the Examples below compatible diagnostic assays may be performed on tissues that have been chemically fixed (including but not limited to: formaldehyde, gluteraldehyde, osmium tetroxide, potassium dichromate, acetic acid, alcohols, zinc salts, mercuric chloride, chromium tetroxide and picric acid) and embedded (including but not limited to: glycol methacrylate, paraffin and resins) or preserved via freezing. Such assays can be used to guide treatment decisions and determine dosing regimens and timing.

[0276] Other particularly compatible aspects of the invention involve the use of in situ hybridization to detect or monitor DLL3 determinants. In situ hybridization technology or ISH is well known to those of skill in the art. Briefly, cells are fixed and detectable probes which contain a specific nucleotide sequence are added to the fixed cells. If the cells contain complementary nucleotide sequences, the probes, which can be detected, will hybridize to them. Using the sequence information set forth herein, probes can be designed to identify cells that express genotypic DLL3 determinants. Probes preferably hybridize to a nucleotide sequence that corresponds to such determinants. Hybridization conditions can be routinely optimized to minimize background signal by non-fully complementary hybridization though preferably the probes are preferably fully complementary to the selected DLL3 determinant. In selected embodiments the probes are labeled with fluorescent dye attached to the probes that is readily detectable by standard fluorescent methodology.

[0277] Compatible in vivo theragnostics or diagnostic assays may comprise art-recognized imaging or monitoring techniques such as magnetic resonance imaging, computerized tomography (e.g. CAT scan), positron tomography (e.g., PET scan) radiography, ultrasound, etc., as would be known by those skilled in the art.

[0278] In a particularly preferred embodiment the antibodies disclosed herein may be used to detect and quantify levels of a particular determinant (e.g., DLL3) in a patient sample (e.g., plasma or blood) which may, in turn, be used to detect, diagnose or monitor proliferative disorders both before and after treatment with the DLL3 sensitized lymphocytes. In related embodiments the antibodies disclosed herein may be used to detect, monitor and/or quantify circulating tumor cells either in vivo or in vitro (WO 2012/0128801) in combination with the disclosed treatments by DLL3 sensitized lymphocytes. In still other embodiments the circulating tumor cells may comprise tumorigenic cells.

[0279] In certain embodiments of the invention, the tumorigenic cells in a subject or a sample from a subject may be assessed or characterized using the disclosed antibodies prior to DLL3 CAR therapy or regimen to establish a baseline. In other examples, the tumorigenic cells can be assessed from a sample that is derived from a subject that was treated.

### XI. Articles of Manufacture

[0280] The invention further includes pharmaceutical packs and kits comprising one or more containers or receptacles, wherein a container can comprise one or more transformation doses of a DLL3 CAR plasmid or vector of the invention. In certain embodiments, the pack or kit contains a vector preparation (e.g., lentiviral or retroviral) comprising a nucleic acid encoding a DLL3 CAR, with or without one or more additional reagents and optionally a means of effecting transduction. Preferably the kit will further include the means to monitor and characterize the preparation of DLL3 sensitized lymphocytes prior to administration.

[0281] Certain other embodiments will comprise a container or receptacle incorporating, containing or holding a liquid formulation (dispersion, suspension or solution) of DLL3 sensitized lymphocytes. In selected embodiments the DLL3 sensitized lymphocytes will be allogenic. In other embodiments the DLL3 sensitized lymphocytes will comprise autologous host cells. In certain other embodiments the liquid formulation will comprise a pharmaceutically acceptable carrier.

[0282] In selected aspects kits compatible with the invention would allow a user to produce the DLL3 sensitive lymphocytes, monitor transduction rates and characterize the resulting DLL3 sensitive lymphocyte population to ensure quality prior to administration. Accordingly, a kit of the invention may generally contain a pharmaceutically acceptable formulation of the CAR nucleic acid (or vector) and, optionally, one or more reagents in the same or different containers. In preferred embodiments the DLL3 CAR vectors will comprise viral vectors (e.g., lentiviral or retroviral) that allow for transduction of selected host cells to provide the disclosed sensitized lymphocytes. In certain embodiments the selected host cell will be autologous while in other embodiments the selected host cells will be allogeneic. Some aspects of the invention are directed to kits including allogeneic cells along with the DLL3 CAR vector. Yet other embodiments comprise kits or containers or receptacles incorporating a pharmaceutical composition comprising allogeneic DLL3 sensitized lymphocytes. Still other articles of manufacture comprise a container incorporating or holding a liquid formulation of autologous DLL3 sensitized lymphocytes in a pharmaceutically acceptable carrier. In all such kits the container may comprise an infusion bag, vial, syringe or bottle that would allow the DLL3 sensitized lymphocytes to be directly administered to the patient.

[0283] The kits may also contain other pharmaceutically acceptable formulations or devices, either for diagnosis or combination therapy. Examples of diagnostic devices or instruments include those that can be used to detect, monitor, quantify or profile cells or markers associated with the DLL3 sensitive lymphocytes, transformation efficiency or the proliferative disorder to be treated. In particularly preferred embodiments the devices may be used to detect, monitor and/or quantify circulating tumor cells either in vivo or in vitro. In still other preferred embodiments the circulating tumor cells may comprise tumorigenic cells.

[0284] When selected components of the kit (e.g., DLL3 sensitized lymphocytes) are provided in one or more liquid solutions, the liquid solution can be non-aqueous though an aqueous solution is preferred, with a sterile aqueous solution being particularly preferred. The formulations of the kit (e.g., a viral vector) can also be provided as dried powder(s) or in lyophilized form that can be reconstituted upon addition of an appropriate liquid. The liquid used for reconstitution can be contained in a separate container. Such liquids can comprise sterile, pharmaceutically acceptable buffer(s) or other diluent(s) such as bacteriostatic water for injection, phosphate-buffered saline, Ringer's solution or dextrose solution. Where the kit comprises the CAR plasmid or vectors of the invention in combination with additional reagents, the solution may be pre-mixed, either in a molar equivalent combination, or with one component in excess of the other. Alternatively, the plasmids of the invention and any optional co-reagents can be maintained separately within distinct containers prior to transformation of the lymphocytes. In other preferred embodiments container(s) of the kit may comprise liquid formulations of allogeneic DLL3 sensitized lymphocytes.

[0285] The disclosed kits can comprise one or multiple containers and a label or package insert in, on or associated with the container(s), indicating that the enclosed composition is useful for treating a proliferative disorder or for preparing cells for treating the selected disease. Suitable containers or receptacles include, for example, bottles, vials, syringes, etc. The containers can be formed from a variety of materials such as glass or plastic. The container(s) can comprise a sterile access port, for example, the container may be an intravenous solution bag or a vial having a stopper that can be pierced by a hypodermic injection needle.

[0286] In some embodiments the kit can contain a means by which to administer the DLL3 sensitized lymphocytes and any optional components to a patient, e.g., one or more needles or syringes (pre-filled or empty), an eye dropper, pipette, or other such like apparatus, from which the formulation may be injected or introduced into the subject or applied to a diseased area of the body. The kits of the invention will also typically include a means for containing the vials, or such like, and other components in close confinement for commercial sale, such as, e.g., blow-molded plastic containers into which the desired vials and other apparatus are placed and retained method.

### XII. Miscellaneous

[0287] Unless otherwise defined herein, scientific and technical terms used in connection with the invention shall have the meanings that are commonly understood by those of ordinary skill in the art. Further, unless otherwise required by context, singular terms shall include pluralities and plural terms shall include the singular. In addition, ranges provided in the specification and appended claims include both end points and all points between the end points. Therefore, a range of 2.0 to 3.0 includes 2.0, 3.0, and all points between 2.0 and 3.0.

[0288] Generally, techniques of cell and tissue culture, molecular biology, immunology, microbiology, genetics and chemistry described herein are those well known and commonly used in the art. The nomenclature used herein, in association with such techniques, is also commonly used in the art. The methods and techniques of the invention are generally performed according to conventional methods well known in the art and as described in various references that are cited throughout the present specification unless otherwise indicated.

### XIII. References

[0289] The complete disclosure of all patents, patent applications, and publications, and electronically available material (including, for example, nucleotide sequence submissions in, e.g., GenBank and RefSeq, and amino acid sequence submissions in, e.g., SwissProt, PIR, PRF, PDB, and translations from annotated coding regions in GenBank and RefSeq) cited herein are incorporated by reference, regardless of whether the phrase “incorporated by reference” is or is not used in relation to the particular reference. The foregoing detailed description and the examples that follow have been given for clarity of understanding only. No unnecessary limitations are to be understood therefrom. The invention is not limited to the exact details shown and described. Variations obvious to one skilled in the art are included in the invention defined by the claims. Any section headings used herein are for organizational purposes only and are not to be construed as limiting the subject matter described method.

### XIV. Sequences

[0290] Appended to the instant application are figures and a sequence listing comprising a number of nucleic acid and amino acid sequences. The following Table 2 provides a summary of the included sequences.

TABLE 2

| SEQ ID NO: | Description |
|---|---|
| 1 | DLL3 isoform 1 protein |
| 2 | DLL3 isoform 2 protein |
| 3 | Epitope protein-SC16.23 |
| 4 | Epitope protein-SC16.34 & SC 16.56 |
| 5 | Kappa constant region protein |
| 6 | IgG1 constant region protein |
| 7 | (G45)3 pentamer |
| 8 | h16.15 scFv protein |
| 9 | SCT1-h16.15 CAR DNA |
| 10 | SCT1-h16.15 CAR protein |
| 11 | h16.13 scFv DNA |
| 12 | h16.13 scFv protein |
| 13 | h16.25 scFv DNA |
| 14 | h16.25 scFv protein |
| 15 | h16.15 scFv DNA |
| 16 | SCT1-h16.13 CAR DNA |
| 17 | SCT1-h16.13 CAR protein |
| 18 | SCT1-h16.25 CAR DNA |
| 19 | SCT1-h16.25 CAR protein |
| 20 | 5016.3 VL DNA (aligned with encoded protein) |
| 21 | 5016.3 VL protein |
| 22 | 5016.3 VH DNA (aligned with encoded protein) |
| 23 | 5016.3 VH protein |
| 24-387 | Additional murine clones as in SEQ ID NOs: 20-23 |
| 388-407 | Humanized clones as in SEQ ID NOs: 20-23 |
| 408, 409, 410 | hSC16.13 CDRL1, CDRL2, CDRL3 |
| 411, 412, 413 | hSC16.13 CDRH1, CDRH2, CDRH3 |
| 414, 415, 416 | hSC16.15 CDRL1, CDRL2, CDRL3 |
| 417, 418, 419 | hSC16.15 CDRH1, CDRH2, CDRH3 |
| 420, 421, 422 | hSC16.25 CDRL1, CDRL2, CDRL3 |
| 423, 424, 425 | hSC16.25 CDRH1, CDRH2, CDRH3 |
| 426, 427, 428 | hSC16.34 CDRL1, CDRL2, CDRL3 |
| 429, 430, 431 | hSC16.34 CDRH1, CDRH2, CDRH3 |
| 432, 433, 434 | hSC16.56 CDRL1, CDRL2, CDRL3 |
| 435, 436, 437 | hSC16.56 CDRH1, CDRH2, CDRH3 |

[0291] As discussed in Example 2 below, Table 2 above may further be used to designate SEQ ID NOS for exemplary Kabat CDRs delineated in FIGS. 1A and 1B. More particularly FIGS. 1A and 1B denote the three Kabat CDRs of each heavy (CDRH) and light (CDRL) chain variable region sequence and Table 2 above provides for assignment of a SEQ ID designation that may be applied to each CDRL1, CDRL2 and CDRL3 of the light chain and each CDRH1, CDRH2 and CDRH3 of the heavy chain. Using this methodology each unique CDR set forth in FIGS. 1A and 1B may be assigned a sequential SEQ ID NO and can be used to provide the derived antibodies of the instant invention.

### XV. Tumor Listing

[0292] PDX tumor cell types are denoted by an abbreviation followed by a number, which indicates the particular tumor cell line. The passage number of the tested sample is indicated by p0-p# appended to the sample designation where p0 is indicative of an unpassaged sample obtained directly from a patient tumor and p# is indicative of the number of times the tumor has been passaged through a mouse prior to testing. As used herein, the abbreviations of the tumor types and subtypes are shown in Table 3 as follows:

TABLE 3

| Tumor Type | Abbreviation | Tumor subtype | Abbreviation |
|---|---|---|---|
| Breast | BR | | |
| | | estrogen receptor positive and/or | BR-ERPR |
| | | progesterone receptor positive | |
| | | ERBB2/Neu positive | BR-ERBB2/Neu |
| | | HER2 positive | BR-HER2 |
| | | triple-negative | TNBC |
| | | claudin subtype of | TNBC-CLDN |
| | | triple-negative | |
| colorectal | CR | | |
| endometrial | EN | | |
| gastric | GA | | |
| | | diffuse adenocarcinoma | GA-Ad-Dif/Muc |
| | | intestinal adenocarcinoma | GA-Ad-Int |
| | | stromal tumors | GA-GIST |
| glioblastoma | GB | | |
| head and neck | HN | | |
| kidney | KDY | | |
| | | clear renal cell carcinoma | KDY-CC |
| | | papillary renal cell carcinoma | KDY-PAP |
| | | transitional cell or urothelial | KDY-URO |
| | | carcinoma | |
| | | unknown | KDY-UNK |
| liver | LIV | | |
| | | hepatocellular carcinoma | LIV-HCC |
| | | cholangiocarcinoma | LIV-CHOL |
| lymphoma | LN | | |
| lung | LU | | |
| | | adenocarcinoma | LU-Ad |
| | | carcinoid | LU-CAR |
| | | large cell neuroendocrine | LU-LCC |
| | | non-small cell | NSCLC |
| | | squamous cell | LU-SCC |
| | | small cell | SCLC |
| | | spindle cell | LU-SPC |
| melanoma | MEL | | |
| ovarian | OV | | |
| | | clear cell | OV-CC |
| | | endometroid | OV-END |
| | | mixed subtype | OV-MIX |
| | | malignant mixed mesodermal | OV-MMMT |
| | | mucinous | OV-MUC |
| | | neuroendocrine | OV-NET |
| | | papillary serous | OV-PS |
| | | serous | OV-S |
| | | small cell | OV-SC |
| | | transitional cell carcinoma | OV-TCC |
| pancreatic | PA | | |
| | | acinar cell carcinoma | PA-ACC |
| | | duodenal carcinoma | PA-DC |
| | | mucinous adenocarcinoma | PA-MAD |
| | | neuroendocrine | PA-NET |
| | | adenocarcinoma | PA-PAC |
| | | adenocarcinoma exocrine type | PA-PACe |
| | | ductal adenocarcinoma | PA-PDAC |
| | | ampullary adenocarcinoma | PA-AAC |
| prostate | PR | | |
| skin | SK | | |
| | | melanoma | MEL |
| | | squamous cell carcinomas | SK-SCC |

### EXAMPLES

[0293] The invention, thus generally described above, will be understood more readily by reference to the following examples, which are provided by way of illustration and are not intended to be limiting of the instant invention. The examples are not intended to represent that the experiments below are all or the only experiments performed. Unless indicated otherwise, parts are parts by weight, molecular weight is weight average molecular weight, temperature is in degrees Centigrade, and pressure is at or near atmospheric.

### Example 1

### Generation of Murine Anti-DLL3 Antibodies

[0294] Anti-DLL3 murine antibodies were produced as follows. In a first immunization campaign, three mice (one from each of the following strains: Balb/c, CD-1, FVB) were inoculated with human DLL3-fc protein (hDLL3-Fc) emulsified with an equal volume of TiterMax® or alum adjuvant. The hDLL3-Fc fusion construct was purchased from Adipogen International (Catalog No. AG-40A-0113). An initial immunization was performed with an emulsion of 10 μg hDLL3-Fc per mouse in TiterMax. Mice were then boosted biweekly with 5 μg hDLL3-Fc per mouse in alum adjuvant. The final injection prior to fusion was with 5 μg hDLL3-Fc per mouse in PBS.

[0295] In a second immunization campaign six mice (two each of the following strains: Balb/c, CD-1, FVB), were inoculated with human DLL3-His protein (hDLL3-His), emulsified with an equal volume of TiterMax® or alum adjuvant. Recombinant hDLL3-His protein was purified from the supernatants of CHO-S cells engineered to overexpress hDLL3-His. The initial immunization was with an emulsion of 10 μg hDLL3-His per mouse in TiterMax. Mice were then boosted biweekly with 5 μg hDLL3-His per mouse in alum adjuvant. The final injection was with 2×10⁵ HEK-293T cells engineered to overexpress hDLL3.

[0296] Solid-phase ELISA assays were used to screen mouse sera for mouse IgG antibodies specific for human DLL3. A positive signal above background was indicative of antibodies specific for DLL3. Briefly, 96 well plates (VWR International, Cat. #610744) were coated with recombinant DLL3-His at 0.5 μg/ml in ELISA coating buffer overnight. After washing with PBS containing 0.02% (v/v) Tween 20, the wells were blocked with 3% (w/v) BSA in PBS, 200 μL/well for 1 hour at room temperature (RT). Mouse serum was titrated (1:100, 1:200, 1:400, and 1:800) and added to the DLL3 coated plates at 50 μL/well and incubated at RT for 1 hour. The plates are washed and then incubated with 50 μL/well HRP-labeled goat anti-mouse IgG diluted 1:10,000 in 3% BSA-PBS or 2% FCS in PBS for 1 hour at RT. Again the plates were washed and 40 μL/well of a TMB substrate solution (Thermo Scientific 34028) was added for 15 minutes at RT. After developing, an equal volume of 2N H₂SO₄ was added to stop substrate development and the plates were analyzed by spectrophotometer at OD 450.

[0297] Sera-positive immunized mice were sacrificed and draining lymph nodes (popliteal, inguinal, and medial iliac) were dissected and used as a source for antibody producing cells. Cell suspensions of B cells (approximately 229×10⁶ cells from the hDLL3-Fc immunized mice, and 510×10⁶ cells from the hDLL3-His immunized mice) were fused with non-secreting P3×63Ag8.653 myeloma cells at a ratio of 1:1 by electro cell fusion using a model BTX Hybrimmune System (BTX Harvard Apparatus). Cells were re-suspended in hybridoma selection medium consisting of DMEM medium supplemented with azaserine, 15% fetal clone I serum, 10% BM Condimed (Roche Applied Sciences), 1 mM nonessential amino acids, 1 mM HEPES, 100 IU penicillin-streptomycin, and 50 μM 2-mercaptoethanol, and were cultured in four T225 flasks in 100 mL selection medium per flask. The flasks were placed in a humidified 370 incubator containing 5% CO₂ and 95% air for six to seven days.

[0298] On day six or seven after the fusions the hybridoma library cells were collected from the flasks and plated at one cell per well (using the FACSAria I cell sorter) in 200 μL of supplemented hybridoma selection medium (as described above) into 64 Falcon 96-well plates, and 48 96-well plates for the hDLL3-His immunization campaign. The rest of the library was stored in liquid nitrogen.

[0299] The hybridomas were cultured for 10 days and the supernatants were screened for antibodies specific to hDLL3 using flow cytometry performed as follows. 1×10⁵ per well of HEK-293T cells engineered to overexpress human DLL3, mouse DLL3 (pre-stained with dye), or cynomolgus DLL3 (pre-stained with Dylight 800) were incubated for 30 minutes with 25 μL hybridoma supernatant. Cells were washed with PBS/2% FCS and then incubated with 25 μL per sample DyeLight 649 labeled goat-anti-mouse IgG, Fc fragment specific secondary diluted 1:300 in PBS/2% FCS. After a 15 minute incubation cells were washed twice with PBS/2% FCS and re-suspended in PBS/2% FCS with DAPI and analyzed by flow cytometry for fluorescence exceeding that of cells stained with an isotype control antibody. Remaining unused hybridoma library cells were frozen in liquid nitrogen for future library testing and screening.

[0300] The hDLL3-His immunization campaign yielded approximately 50 murine anti-hDLL3 antibodies and the hDLL3-Fc immunization campaign yielded approximately 90 murine anti-hDLL3 antibodies.

### Example 2

### Sequencing of Anti-DLL3 Antibodies

[0301] Based on the foregoing, a number of exemplary distinct monoclonal antibodies that bind immobilized human DLL3 or h293-hDLL3 cells with apparently high affinity were selected for sequencing and further analysis. Sequence analysis of the light chain variable regions and heavy chain variable regions from selected monoclonal antibodies generated in Example 1 confirmed that many had novel complementarity determining regions and often displayed novel VDJ arrangements.

[0302] Initially selected hybridoma cells expressing the desired antibodies were lysed in Trizol® reagent (Trizol® Plus RNA Purification System, Life Technologies) to prepare the RNA encoding the antibodies. Between 10⁴ and 10⁵ cells were re-suspended in 1 mL Trizol and shaken vigorously after addition of 200 μL chloroform. Samples were then centrifuged at 4° C. for 10 minutes and the aqueous phase was transferred to a fresh microfuge tube and an equal volume of 70% ethanol was added. The sample was loaded on an RNeasy Mini spin column, placed in a 2 mL collection tube and processed according to the manufacturer's instructions. Total RNA was extracted by elution, directly to the spin column membrane with 100 μL RNase-free water. The quality of the RNA preparations was determined by fractionating 3 μL in a 1% agarose gel before being stored at −80° C. until used.

[0303] The variable region of the Ig heavy chain of each hybridoma was amplified using a 5′ primer mix comprising 32 mouse specific leader sequence primers designed to target the complete mouse VH repertoire in combination with a 3′ mouse Cγ primer specific for all mouse Ig isotypes. Similarly, a primer mix containing thirty two 5′ Vκ leader sequences designed to amplify each of the Vκ mouse families was used in combination with a single reverse primer specific to the mouse kappa constant region in order to amplify and sequence the kappa light chain. For antibodies containing a lambda light chain, amplification was performed using three 5′ VL leader sequences in combination with one reverse primer specific to the mouse lambda constant region. The VH and VL transcripts were amplified from 100 ng total RNA using the Qiagen One Step RT-PCR kit as follows. A total of eight RT-PCR reactions were run for each hybridoma, four for the Vκ light chain and four for the Vγ heavy chain. PCR reaction mixtures included 3 μL of RNA, 0.5 μL of 100 μM of either heavy chain or kappa light chain primers (custom synthesized by Integrated Data Technologies), 5 μL of 5×RT-PCR buffer, 1 μL dNTPs, 1 μL of enzyme mix containing reverse transcriptase and DNA polymerase, and 0.4 μL of ribonuclease inhibitor RNasin (1 unit). The thermal cycler program was RT step 500 for 30 minutes, 950 for 15 minutes followed by 30 cycles of (950 for 30 seconds, 48° C. for seconds, 720 for 1 minute). There was then a final incubation at 720 for 10 minutes.

[0304] The extracted PCR products were sequenced using the same specific variable region primers as described above for the amplification of the variable regions. To prepare the PCR products for direct DNA sequencing, they were purified using the QIAquick™ PCR Purification Kit (Qiagen) according to the manufacturer's protocol. The DNA was eluted from the spin column using 50 μL of sterile water and then sequenced directly from both strands (MCLAB).

[0305] Selected nucleotide sequences were analyzed using the IMGT sequence analysis tool (http//www.imgt.org/IMGTmedicaV sequence_analysis.html) to identify germline V, D and J gene members with the highest sequence homology. These derived sequences were compared to known germline DNA sequences of the Ig V- and J-regions by alignment of VH and VL genes to the mouse germline database using a proprietary antibody sequence database.

[0306] FIG. 1A depicts the contiguous amino acid sequences of numerous novel murine light chain variable regions from anti-DLL3 antibodies and exemplary humanized light chain variable regions derived from the variable light chains of representative murine anti-DLL3 antibodies (as per Example 3 below). FIG. 1B depicts the contiguous amino acid sequences of novel murine heavy chain variable regions from the same anti-DLL3 antibodies and humanized heavy chain variable regions derived from the same murine antibodies providing the humanized light chains (as per Example 3 below). Murine light and heavy chain variable region amino acid sequences are provided in SEQ ID NOS: 21-387, odd numbers while humanized light and heavy chain variable region amino acid sequences are provided in SEQ ID NOS: 389-407, odd numbers.

[0307] Thus, taken together FIGS. 1A and 1B provide the annotated sequences of numerous murine anti-DLL3 binding or targeting domains, termed SC16.3, SC16.4, SC16.5, SC16.7, SC16.8, SC16.10, SC16.11, SC16.13, SC16.15, SC16.18, SC16.19, SC16.20, SC16.21, SC16.22, SC16.23, SC16.25, SC16.26, SC16.29, SC16.30, SC16.31, SC16.34, SC16.35, SC16.36, SC16.38, SC16.41, SC16.42, SC16.45, SC16.47, SC16.49, SC16.50, SC16.52, SC16.55, SC16.56, SC16.57, SC16.58, SC16.61, SC16.62, SC16.63, SC16.65, SC16.67, SC16.68, SC16.72, SC16.73, SC16.78, SC16.79, SC16.80, SC16.81, SC16.84, SC16.88, SC16.101, SC16.103, SC16.104, SC16.105, SC16.106, SC16.107, SC16.108, SC16.109, SC16.110, SC16.111, SC16.113, SC16.114, SC16.115, SC16.116, SC16.117, SC16.118, SC16.120, SC16.121, SC16.122, SC16.123, SC16.124, SC16.125, SC16.126, SC16.129, SC16.130, SC16.131, SC16.132, SC16.133, SC16.134, SC16.135, SC16.136, SC16.137, SC16.138, SC16.139, SC16.140, SC16.141, SC16.142, SC16.143, SC16.144, SC16.147, SC16.148, SC16.149 and SC16.150 and humanized antibodies, termed hSC16.13, hSC16.15, hSC16.25, hSC16.34 and hSC16.56.

[0308] In particular aspects of the invention the CAR binding domain binds specifically to hDLL3 and was derived from, comprises or competes for binding with an antibody comprising: a light chain variable region (VL) of SEQ ID NO: 21 and a heavy chain variable region (VH) of SEQ ID NO: 23; or a VL of SEQ ID NO: 25 and a VH of SEQ ID NO: 27; or a VL of SEQ ID NO: 29 and a VH of SEQ ID NO: 31; or a VL of SEQ ID NO: 33 and a VH of SEQ ID NO: 35; or a VL of SEQ ID NO: 37 and a VH of SEQ ID NO: 39; or a VL of SEQ ID NO: 41 and a VH of SEQ ID NO: 43; or a VL of SEQ ID NO: 45 and a VH of SEQ ID NO: 47; or a VL of SEQ ID NO: 49 and a VH of SEQ ID NO: 51; or a VL of SEQ ID NO: 53 and a VH of SEQ ID NO: 55; or a VL of SEQ ID NO: 57 and a VH of SEQ ID NO: 59; or a VL of SEQ ID NO: 61 and a VH of SEQ ID NO: 63; or a VL of SEQ ID NO: 65 and a VH of SEQ ID NO: 67; or a VL of SEQ ID NO: 69 and a VH of SEQ ID NO: 71; or a VL of SEQ ID NO: 73 and a VH of SEQ ID NO: 75; or a VL of SEQ ID NO: 77 and a VH of SEQ ID NO: 79; or a VL of SEQ ID NO: 81 and a VH of SEQ ID NO: 83; or a VL of SEQ ID NO: 85 and a VH of SEQ ID NO: 87; or a VL of SEQ ID NO: 89 and a VH of SEQ ID NO: 91; or a VL of SEQ ID NO: 93 and a VH of SEQ ID NO: 95; or a VL of SEQ ID NO: 97 and a VH of SEQ ID NO: 99; or a VL of SEQ ID NO: 101 and a VH of SEQ ID NO: 103; or a VL of SEQ ID NO: 105 and a VH of SEQ ID NO: 107; or a VL of SEQ ID NO: 109 and a VH of SEQ ID NO: 111; or a VL of SEQ ID NO: 113 and a VH of SEQ ID NO: 115; or a VL of SEQ ID NO: 117 and a VH of SEQ ID NO: 119; or a VL of SEQ ID NO: 121 and a VH of SEQ ID NO: 123; or a VL of SEQ ID NO: 125 and a VH of SEQ ID NO: 127; or a VL of SEQ ID NO: 129 and a VH of SEQ ID NO: 131; or a VL of SEQ ID NO: 133 and a VH of SEQ ID NO: 135; or a VL of SEQ ID NO: 137 and a VH of SEQ ID NO: 139; or a VL of SEQ ID NO: 141 and a VH of SEQ ID NO: 143; or a VL of SEQ ID NO: 145 and a VH of SEQ ID NO: 147; or a VL of SEQ ID NO: 149 and a VH of SEQ ID NO: 151; or a VL of SEQ ID NO: 153 and a VH of SEQ ID NO: 155; or a VL of SEQ ID NO: 157 and a VH of SEQ ID NO: 159; or a VL of SEQ ID NO: 161 and a VH of SEQ ID NO: 163; or a VL of SEQ ID NO: 165 and a VH of SEQ ID NO: 167; or a VL of SEQ ID NO: 169 and a VH of SEQ ID NO: 171; or a VL of SEQ ID NO: 173 and a VH of SEQ ID NO: 175; or a VL of SEQ ID NO: 177 and a VH of SEQ ID NO: 179; or a VL of SEQ ID NO: 181 and a VH of SEQ ID NO: 183; or a VL of SEQ ID NO: 185 and a VH of SEQ ID NO: 187; or a VL of SEQ ID NO: 189 and a VH of SEQ ID NO: 191; or a VL of SEQ ID NO: 193 and a VH of SEQ ID NO: 195; or a VL of SEQ ID NO: 197 and a VH of SEQ ID NO: 199; or a VL of SEQ ID NO: 201 and a VH of SEQ ID NO: 203; or a VL of SEQ ID NO: 205 and a VH of SEQ ID NO: 207; or a VL of SEQ ID NO: 209 and a VH of SEQ ID NO: 211; or a VL of SEQ ID NO: 213 and a VH of SEQ ID NO: 215; or a VL of SEQ ID NO: 217 and a VH of SEQ ID NO: 219; or a VL of SEQ ID NO: 221 and a VH of SEQ ID NO: 223; or a VL of SEQ ID NO: 225 and a VH of SEQ ID NO: 227; or a VL of SEQ ID NO: 229 and a VH of SEQ ID NO: 231; or a VL of SEQ ID NO: 233 and a VH of SEQ ID NO: 235; or a VL of SEQ ID NO: 237 and a VH of SEQ ID NO: 239; or a VL of SEQ ID NO: 241 and a VH of SEQ ID NO: 243; or a VL of SEQ ID NO: 245 and a VH of SEQ ID NO: 247; or a VL of SEQ ID NO: 249 and a VH of SEQ ID NO: 251; or a VL of SEQ ID NO: 253 and a VH of SEQ ID NO: 255; or a VL of SEQ ID NO: 257 and a VH of SEQ ID NO: 259; or a VL of SEQ ID NO: 261 and a VH of SEQ ID NO: 263; or a VL of SEQ ID NO: 265 and a VH of SEQ ID NO: 267; or a VL of SEQ ID NO: 269 and a VH of SEQ ID NO: 271; or a VL of SEQ ID NO: 273 and a VH of SEQ ID NO: 275; or a VL of SEQ ID NO: 277 and a VH of SEQ ID NO: 279; or a VL of SEQ ID NO: 281 and a VH of SEQ ID NO: 283; or a VL of SEQ ID NO: 285 and a VH of SEQ ID NO: 287; or a VL of SEQ ID NO: 289 and a VH of SEQ ID NO: 291; or a VL of SEQ ID NO: 293 and a VH of SEQ ID NO: 295; or a VL of SEQ ID NO: 297 and a VH of SEQ ID NO: 299; or a VL of SEQ ID NO: 301 and a VH of SEQ ID NO: 303; or a VL of SEQ ID NO: 305 and a VH of SEQ ID NO: 307; or a VL of SEQ ID NO: 309 and a VH of SEQ ID NO: 311; or a VL of SEQ ID NO: 313 and a VH of SEQ ID NO: 315; or a VL of SEQ ID NO: 317 and a VH of SEQ ID NO: 319; or a VL of SEQ ID NO: 321 and a VH of SEQ ID NO: 323; or a VL of SEQ ID NO: 325 and a VH of SEQ ID NO: 327; or a VL of SEQ ID NO: 329 and a VH of SEQ ID NO: 331; or a VL of SEQ ID NO: 333 and a VH of SEQ ID NO: 335; or a VL of SEQ ID NO: 337 and a VH of SEQ ID NO: 339; or a VL of SEQ ID NO: 341 and a VH of SEQ ID NO: 343; or a VL of SEQ ID NO: 345 and a VH of SEQ ID NO: 347; or a VL of SEQ ID NO: 349 and a VH of SEQ ID NO: 351; or a VL of SEQ ID NO: 353 and a VH of SEQ ID NO: 355; or a VL of SEQ ID NO: 357 and a VH of SEQ ID NO: 359; or a VL of SEQ ID NO: 361 and a VH of SEQ ID NO: 363; or a VL of SEQ ID NO: 365 and a VH of SEQ ID NO: 367; or a VL of SEQ ID NO: 369 and a VH of SEQ ID NO: 371; or a VL of SEQ ID NO: 373 and a VH of SEQ ID NO: 375; or a VL of SEQ ID NO: 377 and a VH of SEQ ID NO: 379; or a VL of SEQ ID NO: 381 and a VH of SEQ ID NO: 383; or a VL of SEQ ID NO: 385 and a VH of SEQ ID NO: 387; or a VL of SEQ ID NO: 389 and a VH of SEQ ID NO: 391; or a VL of SEQ ID NO: 393 and a VH of SEQ ID NO: 395; or a VL of SEQ ID NO: 397 and a VH of SEQ ID NO: 399; or a VL of SEQ ID NO: 401 and a VH of SEQ ID NO: 403; or a VL of SEQ ID NO: 405 and a VH of SEQ ID NO: 407.

[0309] For the purposes of the instant application the SEQ ID NOS of each particular antibody are sequential odd numbers. Thus the monoclonal anti-DLL3 antibody, SC16.3, comprises amino acid SEQ ID NOS: 21 and 23 for the light and heavy chain variable regions respectively; SC16.4 comprises SEQ ID NOS: 25 and 27; SC16.5 comprises SEQ ID NOS: 29 and 31, and so on. A corresponding nucleic acid sequence encoding each antibody amino acid sequence is included in the appended sequence listing and has the SEQ ID NO immediately preceding the corresponding amino acid SEQ ID NO: Thus, for example, the SEQ ID NOS of the VL and VH of the SC16.3 antibody are 21 and 23 respectively, and the SEQ ID NOS of the nucleic acid sequences encoding the VL and VH of the SC16.3 antibody are SEQ ID NOS: 20 and 22 respectively.

[0310] It should be noted that, due to sequencing anomalies, certain heavy and light chain variable region sequences were prematurely truncated during the sequencing process. This resulted in the omission of one or more amino acids in the reported FR4 sequence. In such cases compatible amino acids (determined by review of corresponding sequences from other antibody clones) have been supplied to essentially complete the variable region sequence. For example, the residues “IK” were added to the terminal end of the SC16.22 light chain sequence in FIG. 1A (SEQ ID NO: 73) to provide an operable light chain variable region with a complete framework 4. Bases encoding the added amino acids were similarly added to the corresponding nucleic acid sequence (SEQ ID NO: 72) to ensure consistency. In each such case in FIGS. 1A and 1B (but not in the appended sequence listing) the added amino acids are underlined and bolded so as to be readily identified. The CDRs in FIGS. 1A and 1B are defined as per Kabat et al. (supra) using a proprietary version of the Abysis database.

### Example 3

### Generation of Chimeric and Humanized Anti-DLL3 Antibodies

[0311] To provide a benchmark for humanized binding domains compatible with the instant invention five (e.g. SC16.13, SC16.15, SC16.25, SC16.34 and SC16.56) exemplary chimeric anti-DLL3 antibodies were generated using art-recognized techniques as follows. Total RNA was extracted from the hybridomas and amplified as set forth in Example 1. Data regarding V, D and J gene segments of the VH and VL chains of the murine antibodies were obtained from the derived nucleic acid sequences. Primer sets specific to the leader sequence of the VH and VL chain of the antibody were designed using the following restriction sites: AgeI and XhoI for the VH fragments, and XmaI and DraIII for the VL fragments. PCR products were purified with a QIAquick PCR purification kit (Qiagen), followed by digestion with restriction enzymes AgeI and XhoI for the VH fragments and XmaI and DraIII for the VL fragments. The VL and VH digested PCR products were purified and ligated into kappa CL (SEQ ID NO: 5) human light chain constant region expression vector or IgG1 (SEQ ID NO: 6) human heavy chain constant region expression vector, respectively.

[0312] Ligation reactions were performed in a total volume of 10 μL with 200U T4-DNA Ligase (New England Biolabs), 7.5 μL of digested and purified gene-specific PCR product and 25 ng linearized vector DNA. Competent E. coli DH10B bacteria (Life Technologies) were transformed via heat shock at 42° C. with 3 μL ligation product and plated onto plates with ampicillin at a concentration of 100 μg/mL. Following purification and digestion of the amplified ligation products, the VH fragment was cloned into the AgeI-XhoI restriction sites of the pEE6.4HuIgG1 expression vector (Lonza) and the VL fragment was cloned into the XmaI-DraIII restriction sites of the pEE12.4Hu-Kappa expression vector (Lonza).

[0313] Chimeric antibodies were expressed by co-transfection of HEK-293T cells with pEE6.4HuIgG1 and pEE12.4Hu-Kappa expression vectors. Prior to transfection the HEK-293T cells were cultured in 150 mm plates under standard conditions in Dulbecco's Modified Eagle's Medium (DMEM) supplemented with 10% heat inactivated FCS, 100 μg/mL streptomycin and 100 U/mL penicillin G. For transient transfections cells were grown to 80% confluency. 12.5 μg each of pEE6.4HuIgG1 and pEE12.4Hu-Kappa vector DNA were added to 50 μL HEK-293T transfection reagent in 1.5 mL Opti-MEM. The mix was incubated for 30 minutes at room temperature and plated. Supernatants were harvested three to six days after transfection. Culture supernatants containing recombinant chimeric antibodies were cleared from cell debris by centrifugation at 800×g for 10 minutes and stored at 4° C. Recombinant chimeric antibodies were purified by Protein A affinity chromatography.

[0314] The same murine anti-DLL3 antibodies (e.g. SC16.13, SC16.15, SC16.25, SC16.34 and SC16.56) were also used to derive CDR-grafted or humanized binding domains. The murine antibodies were humanized using a proprietary computer-aided CDR-grafting method (Abysis Database, UCL Business) and standard molecular engineering techniques as follows. Human framework regions of the variable regions were designed based on the highest homology between the framework sequences and CDR canonical structures of human germline antibody sequences and the framework sequences and CDRs of the relevant mouse antibodies. For the purpose of the analysis the assignment of amino acids to each of the CDR domains was done in accordance with Kabat et al. Once the variable regions were selected, they were generated from synthetic gene segments (Integrated DNA Technologies). Humanized antibodies were cloned and expressed using the molecular methods described above for chimeric antibodies.

[0315] The genetic composition for the selected human acceptor variable regions are shown in TABLE 4 immediately below for each of the humanized antibodies. The sequences depicted in TABLE 4 correspond to the contiguous variable region amino acid sequences set forth in SEQ ID NOS: 389 and 391 (hSC16.13), SEQ ID NOS: 393 and 395 (hSC16.15), SEQ ID NOS: 397 and 399 (hSC16.25), SEQ ID NOS: 401 and 403 (hSC16.34) and SEQ ID NOS: 405 and 407 (hSC16.56) in FIGS. 1A and 1B. TABLE 4 shows that no framework changes or back mutations were necessary to maintain the favorable binding properties of the selected antibodies.

TABLE 4

| mAb | human VH | human DH | human JH | FW changes | human VK | human JK | FW changes |
|---|---|---|---|---|---|---|---|
| hSC16.13 | IGHV2-5*01 | IGHD1-1 | JH6 | None | IGKV1-39*01 | JK1 | None |
| hSC16.15 | IGHV1-46*01 | IGHD2-2 | JH4 | None | IGKV1-13*02 | JK4 | None |
| hSC16.25 | IGHV2-5*01 | IGHD3-16 | JH6 | None | IGKV6-21*01 | JK2 | None |
| hSC16.34 | IGHV1-3*02 | IGHD3-22 | JH4 | None | IGKV1-27*01 | JK1 | None |
| hSC16.56 | IGHV1-18*01 | IGHD2-21 | JH4 | None | IGKV3-15*01 | JK2 | None |

[0316] Although no residues were altered in the framework regions, in one of the humanized clones (hSC16.13) mutations were introduced into heavy chain CDR2 to address stability concerns. The binding affinity of the antibody with the modified CDR was checked to ensure that it was equivalent to either the corresponding chimeric or murine antibody.

[0317] Following humanization of the selected antibodies the resulting VL and VH chain amino acid sequences were analyzed to determine their homology with regard to the murine donor and human acceptor light and heavy chain variable regions. The results shown in TABLE 5, immediately below, reveal that the humanized constructs consistently exhibited a higher homology with respect to the human acceptor sequences than with the murine donor sequences. The murine heavy and light chain variable regions show a similar overall percentage homology to a closest match of human germline genes (85%-93%) compared with the homology of the humanized antibodies and the donor hybridoma protein sequences (74%-83%).

TABLE 5

| | Homology to Human | Homology to Murine Parent |
|---|---|---|
| mAb | (CDR acceptor) | (CDR donor) |
| hSC16.13 HC | 93% | 81% |
| hSC16.13 LC | 87% | 77% |
| hSC16.15 HC | 85% | 83% |
| hSC16.15 LC | 85% | 83% |
| hSC16.25 HC | 91% | 83% |
| hSC16.25 LC | 85% | 79% |
| hSC16.34 HC | 87% | 79% |
| hSC16.34 LC | 85% | 81% |
| hSC16.56 HC | 87% | 74% |
| hSC16.56 LC | 87% | 76% |

[0318] Each of the derived humanized constructs were analyzed using surface plasmon resonance, to determine if the CDR grafting process had appreciably altered their apparent affinity for DLL3 protein. The humanized constructs were compared with chimeric antibodies comprising the murine parent (or donor) heavy and light chain variable domains and a human constant region substantially equivalent to that used in the humanized constructs. The humanized anti-DLL3 antibodies exhibited binding characteristics roughly comparable to those shown by the chimeric parent antibodies (data not shown).

### Example 4

### Domain and Epitope Mapping of Anti-DLL3 Antibodies

[0319] In order to characterize and position the epitopes that the disclosed anti-DLL3 antibodies bind to, domain-level epitope mapping was performed using a modification of the protocol described by Cochran et al., 2004 (supra). Individual domains of DLL3 comprising specific amino acid sequences were expressed on the surface of yeast, and binding by each anti-DLL3 antibody was determined through flow cytometry.

[0320] Yeast display plasmid constructs were created for the expression of the following constructs: DLL3 extracellular domain (amino acids 27-466); DLL1-DLL3 chimera, which consists of the N-terminal region and DSL domain of DLL1 (amino acids 22-225) fused to EGF-like domains 1 through 6 of DLL3 (amino acids 220-466); DLL3-DLL1 chimera, which consists of the N-terminal region and DSL domain of DLL3 (amino acids 27-214) fused to EGF-like domains 1 through 8 of DLL1 (amino acids 222-518); EGF1 (amino acids 215-249); EGF2 (amino acids 274-310); EGF1 and EGF2 (amino acids 215-310); EGF3 (amino acids 312-351); EGF4 (amino acids 353-389); EGF5 (amino acids 391-427); and EGF6 (amino acids 429-465). For domain information see generally UniProtKB/Swiss-Prot database entry Q9NYJ7. Note that the amino acid numbering references an unprocessed DLL3 protein with a leader sequence included in the sequence set forth in SEQ ID NO: 1). For analysis of the N-terminal region or the EGF domains as a whole, chimeras with the family member DLL1 (DLL1-DLL3 and DLL3-DLL1) were used as opposed to fragments to minimize potential problems with protein folding. Domain-mapped antibodies had previously been shown not to cross-react with DLL1 indicating that any binding to these constructs was occurring through association with the DLL3 portion of the construct. These plasmids were transformed into yeast, which were then grown and induced as described in Cochran et al.

[0321] To test for binding to a particular construct, 200,000 induced yeast cells expressing the desired construct were washed twice in PBS+1 mg/mL BSA (PBSA), and incubated in 50 μL of PBSA with biotinylated anti-HA clone 3F10 (Roche Diagnostics) at 0.1 μg/mL and either 50 nM purified antibody or 1:2 dilution of unpurified supernatant from hybridomas cultured for 7 days. Cells were incubated for 90 minutes on ice, followed by two washes in PBSA. Cells were then incubated in 50 μL PBSA with the appropriate secondary antibodies: for murine antibodies, Alexa 488 conjugated streptavidin, and Alexa 647 conjugated goat anti mouse (Life Technologies) were added at 1 μg/mL each; and for humanized or chimeric antibodies, Alexa 647 conjugated streptavidin (Life Technologies) and R-phycoerythrin conjugated goat anti human (Jackson Immunoresearch) were added at 1 μg/mL each. After a twenty minute incubation on ice, cells were washed twice with PBSA and analyzed on a FACS Canto II. Antibodies that bound to DLL3-DLL1 chimera were designated as binding to the N-terminal region+DSL. Antibodies that bound specifically to an epitope present on a particular EGF-like domain were designated as binding to its respective domain (FIG. 2.)

[0322] In order to classify an epitope as conformational (e.g., discontinuous) or linear, yeast displaying the DLL3 ECD was heat treated for 30 minutes at 80° C. to denature the DLL3 ECD, and then washed twice in ice-cold PBSA. The ability of anti-DLL3 antibodies to bind the denatured yeast was tested by FACS using the same staining protocol as described above. Antibodies that bound to both the denatured and native yeast were classified as binding to a linear epitope, whereas antibodies that bound native yeast but not denatured yeast were classified as conformationally specific.

[0323] A schematic summary of the domain-level epitope mapping data of the antibodies tested is presented in FIG. 2, with antibodies binding a linear epitope underlined and, where determined, the corresponding bin noted in parenthesis. A review of FIG. 2 shows that the majority of anti-DLL3 antibodies tended to map to epitopes found either in the N-terminal/DSL region of DLL3 or EGF2.

[0324] Fine epitope mapping was further performed on selected antibodies using one of two methods. The first method employed the Ph.D.-12 phage display peptide library kit (New England Biolabs) which was used in accordance with the manufacturer's instructions. The antibody for epitope mapping was coated overnight at 50 μg/mL in 3 mL 0.1 M sodium bicarbonate solution, pH 8, onto a Nunc MaxiSorp tube (Nunc). The tube was blocked with 3% BSA solution in bicarbonate solution. Then, 10¹¹ input phage in PBS+0.1% Tween-20 was allowed to bind, followed by ten consecutive washes with 0.1% Tween-20 to wash away non-binding phage. Remaining phage were eluted with 1 mL 0.2 M glycine for 10 minutes at room temperature with gentle agitation, followed by neutralization with 150 μL 1M Tris-HCl pH 9. Eluted phage were amplified and panned again with 10¹¹ input phage, using 0.5% Tween-20 during the wash steps to increase selection stringency. DNA from 24 plaques of the eluted phage from the second round was isolated using the Qiaprep M13 Spin kit (Qiagen) and sequenced. Binding of clonal phage was confirmed using an ELISA assay, where the mapped antibody or a control antibody was coated onto an ELISA plate, blocked, and exposed to each phage clone. Phage binding was detected using horseradish peroxidase conjugated anti-M13 antibody (GE Healthcare), and the 1-Step Turbo TMB ELISA solution (Pierce). Phage peptide sequences from specifically binding phage were aligned using Vector NTI (Life Technologies) against the antigen ECD peptide sequence to determine the epitope of binding.

[0325] Alternatively, a yeast display method (Chao et al., 2007, PMID: 17406305) was used to map the epitopes of selected antibodies. Libraries of DLL3 ECD mutants were generated with error prone PCR using nucleotide analogues 8-oxo-2′deoxyguanosine-5′-triphosphate and 2′-deoxy-p-nucleoside-5′triphosphate (TriLink Bio) for a target mutagenesis rate of one amino acid mutation per clone. These were transformed into a yeast display format. Using the technique described above for domain-level mapping, the library was stained for HA and antibody binding at 50 nM. Using a FACS Aria (BD), clones that exhibited a loss of binding compared to wild type DLL3 ECD were sorted. These clones were re-grown, and subjected to another round of FACS sorting for loss of binding to the target antibody. Using the Zymoprep Yeast Plasmid Miniprep kit (Zymo Research), individual ECD clones were isolated and sequenced. Where necessary, mutations were reformatted as single-mutant ECD clones using the Quikchange site directed mutagenesis kit (Agilent).

[0326] Individual ECD clones were next screened to determine whether loss of binding was due to a mutation in the epitope, or a mutation that caused misfolding. Mutations that involved cysteine, proline, and stop codons were automatically discarded due to the high likelihood of a misfolding mutation. Remaining ECD clones were then screened for binding to a non-competing, conformationally specific antibody. ECD clones that lost binding to non-competing, conformationally specific antibodies were concluded to contain misfolding mutations, whereas ECD clones that retained equivalent binding to wild type DLL3 ECD were concluded to be properly folded. Mutations in the ECD clones in the latter group were concluded to be in the epitope.

[0327] A summary of selected antibodies with their derived epitopes comprising amino acid residues that are involved in antibody binding are listed in TABLE 6 below. Antibodies SC16.34 and SC16.56 interact with common amino acid residues which is consistent with the binning information and domain mapping results shown in FIG. 2. Moreover, SC16.23 was found to interact with a distinct contiguous epitope and was found not to bin with SC16.34 or SC16.56. Note that for the purposes of the appended sequence listing SEQ ID NO: 4 comprises a placeholder amino acid at position 204.

TABLE 6

| Antibody Clone | Epitope | SEQ ID NO: |
|---|---|---|
| SC16.23 | Q93, P94, G95, A96, P97 | 3 |
| SC16.34 | G203, R205, P206 | 4 |
| SC16.56 | G203, R205, P206 | 4 |

### Example 5

### Generation of an Anti-DLL3 Chimeric Antigen Receptor

[0328] Fabrication of an Anti-CD19 CAR

[0329] To generate a positive control CAR construct, a synthetic open reading frame encoding a second generation CAR directed towards human CD19 (see US2014/0271635) was synthesized (Life Technologies) and subcloned into the multiple cloning site (MCS) of the lentiviral expression vector pCDH-CMV-MCS-EF1-GFP-T2A-Puro (System Biosciences, Mountain View Calif.). This anti-CD19 CAR open reading frame comprises nucleotides, from 5′ to 3′, encoding the signal leader sequence from the human CD8 alpha chain (amino acids 1-21, UniProt accession P01732-1), a scFv derived from a mouse monoclonal antibody recognizing human CD19 (Nicholson et al, 1997; PMID 9566763), the human CD8 alpha hinge, transmembrane domain and proximal region (amino acids 138-206, UniProt accession P01732-1), the intracellular costimulatory signaling region from the human 4-1BB protein (amino acids 214-255, UniProt accession Q07011-1), and the human CD3_{ζ} chain intracellular signaling region (amino acids 52-164, UniProt accession P20963-1 with a Q65K modification). When expressed on lymphocytes the resulting CD19 CAR-T exhibited the expected immunostimulatory activity.

[0330] Besides providing a positive control the anti-CD19 CAR/lentiviral expression vector was designed with restriction sites in such a way that the anti-CD19 scFv component could be easily removed and substituted with an alternative binding region component directed to any selected determinant (e.g., DLL3). As described below, this cassette system (designated SCT1-XX where XX indicates the particular DLL3 binding domain component) was used to validate various embodiments of the instant invention. Note that the SCT nomenclature may, depending on the context, refer to the expressed anti-DLL3 CAR protein, cytotoxic lymphocytes expressing the CAR protein, the anti-DLL3 CAR ORF or an expression vector (e.g., lentiviral, retroviral, plasmid, etc.) comprising the same ORF.

[0331] Fabrication of SCT1-h16.15.

[0332] To generate a novel anti-DLL3 CAR construct (SCT1-h16.15), a nucleotide sequence encoding an scFv fragment was first synthesized by operably linking anti-hSC16.15 VL (SEQ ID NO: 394) and VH (SEQ ID NO: 396) nucleotide sequences together via a nucleic acid sequence encoding a pentameric multimer GlyGlyGlyGlySer (G₄S)₃ (GGGGSGGGGSGGGGS; SEQ ID NO: 7) linker to provide a hSC16.15-scFv polynucleotide (SEQ ID NO: 15) that encodes the hSC16.15-scFv protein. Both exemplary nucleic acid and amino acid sequences are set forth immediately below:

(SEQ ID NO: 8)
AIQLTQSPSSLSASVGDRVTITCRASENIYYNLAWYQQKPGKAPKLLIYT
ANSLEDVPSRFSGSGSGTDFTLTISSLQPEDFATYFCKQAYDVPPTFGGG
TKLEIKGGGGSGGGGSGGGGSQVQLVQSGAEVKKPGASVKVSCKASGYTF
TRYWIHWIRQAPGQGLEWMGYINPTVYTEFNQNFKDRVTMTRDTSTSTVY
MELSSLRSEDTAVYYCARGGSNFFDYWQGTTVTVSS
and:
(SEQ ID NO: 15)
gccatccagttgacccagtctccatcctccctgtctgcatctgtaggaga
cagagtcaccatcacttgccgggcaagtgagaacatttactacaatttag
cctggtatcagcagaaaccagggaaagctcctaagctcctgatctatact
gccaatagtttggaagatggggtcccatcaaggttcagcggcagtggatc
tgggacagatttcactctcaccatcagcagcctgcagcctgaagattttg
caacttatttttgtaaacaggcttatgacgttcctccgacgttcggtgga
ggcaccaagctggaaatcaaaggcggcggaggatctggcggaggcggaag
tggcggagggggatctcaggtgcagctggtgcagtctggggctgaggtga
agaagcctggggcctcagtgaaggtttcctgcaaggcatctggatacacc
ttcaccaggtactggatacactggatacgacaggcccctggacaagggct
tgagtggatgggatacatcaaccctacaactgtttatactgagttcaatc
agaacttcaaggacagagtcaccatgaccagggacacgtccacgagcaca
gtctacatggagctgagcagcctgagatctgaggacacggccgtgtatta
ctgtgcgagaggcggtagtaacttctttgactactggggccaaggcacca
ctgtcacagtctcctcg.

[0333] Using standard molecular engineering techniques the hSC16.15-scFv nucleotide sequence was subsequently cloned into the SCT1 cassette to provide a SCT1-h16.15 lentiviral expression vector comprising an anti-DLL3 CAR. In this regard the SCT1-h16.15 CAR comprises an open reading frame encoding the following elements from 5′ to 3′: CD8 alpha chain leader region (amino acids 1-21, UniProt P01732-1), h16.15 VL domain (as per Example 3), (G₄S)₃ synthetic linker sequence (amino acid 1-15, Huston et al., 1988), h16.15 VH domain (as per Example 3), the human CD8 alpha hinge and transmembrane domain (amino acids 138-206, UniProt accession P01732-1), the intracellular costimulatory signaling region from the human 4-1BB protein (amino acids 214-255, UniProt accession Q07011-1) and the human CD3c chain intracellular signaling region (amino acids 52-164, UniProt accession P20963-1 with a Q65K modification). The CAR open reading frame was sequence confirmed. A schematic diagram of the SCT1-h16.15 CAR open reading frame is set forth in FIG. 3 with the corresponding nucleic acid (SEQ ID NO: 9) and amino acid (SEQ ID NO: 10) sequences set forth in FIG. 4A. Note that in FIG. 4A the incorporated sc16.15 scFv binding domain is underlined (corresponding to SEQ ID NO; 8).

### Example 6

### Generation of Additional Exemplary

### Anti-DLL3 Chimeric Antigen Receptors

[0334] To further demonstrate the scope and adaptability of the instant invention two DLL3 binding domains, in the form of scFv constructs compatible with the disclosed DLL3 CARs, were fabricated and incorporated into SCT1-16 CARs substantially as set forth above. More specifically, to generate novel anti-DLL3 binding domain constructs in accordance with the instant disclosure nucleotide sequences encoding scFv fragments were synthesized by operably linking selected VL and VH nucleotide sequences together via a nucleic acid sequence encoding a pentameric multimer GlyGlyGlyGlySer (G₄S)₃ (GGGGSGGGGSGGGGS; SEQ ID NO: 7) linker. In the first case the scFv polynucleotide (scFv-hSC16.13) comprises variable light and heavy chain sequences from hSC16.13 (SEQ ID NOS: 388 and 390) while in the second case the scFv polynucleotide (scFv-hSC16.25) comprises variable light and heavy chain sequences from hSC16.25 (SEQ ID NOS: 396 and 398). The resulting nucleic acid constructs encoding scFv-hSC16.13 (SEQ ID NO: 11) and scFv-hSC16.25 (SEQ ID NO: 13) were then inserted in the SCT1 cassette using the engineered restriction sites to provide SCT1-hSC16.13 and SCT1-hSC16.25. The nucleic acid (SEQ ID NO: 16) and amino acid (SEQ ID NO: 17) sequences of SCT1-hSC16.13 are shown in FIG. 4B while the nucleic acid (SEQ ID NO: 18) and amino acid (SEQ ID NO: 19) sequences of SCT1-hSC16.25 are shown in FIG. 4C. Note that in both FIGS. the amino acid sequence corresponding to the DLL3 scFv binding domain is underlined as well as being set forth in SEQ ID NO: 12 (h16.13 scFv) and SEQ ID NO: 14 (h16.25 scFv) respectively.

[0335] The ease of fabricating these CARs using the disclosed SCT1 cassette system illustrates the versatility of the instant invention with regard to the selection and incorporation of various DLL3 binding domains and more generally demonstrates the modular nature of the constructs. As such, it will be appreciated that the concept of the DLL3 CARS set forth herein is not limited to any particular DLL3 binding domain or by the selection of any other particular component (e.g. a specific transmembrane or signaling domain) as long as the resulting DLL3 sensitized lymphocyte is immunostimulated or activated by exposure to a DLL3 expressing cell (e.g., a tumor cell).

### Example 7

### Generation and Characterization of Lentiviral Vector Particles

[0336] Lentiviral vector packaging of the exemplary DLL3 CARs SCT1-h16.13, SCT1-h16.15 and SCT1-h16.25 from Examples 5 and 6, were carried out as follows: 10 ug of the selected SCT1-h16 plasmid, 7 ug of pAR8.74, and 4 ug of pMD2.G were co-transfected into ten-million HEK-293T cells (ATCC) in the presence of polyethylenemine (Polysciences) at a DNA:PEI ratio of 1:4. Co-transfected cells were incubated at 37° C. (5% CO₂) overnight, followed by media exchange the next day. Forty-eight hours post-transfection, culture media containing lentiviral particles was harvested and clarified by centrifugation at 1200 rpm for 5 min at 4° C. to remove cell debris. To pellet lentiviral vector particles the clarified culture media was ultracentrifuged at 19500 rpm for two hours at 4° C. After ultracentrifugation the supernatant was discarded, the viral pellet resuspended in sterile PBS, and stored at −80° C. Quantitation of recovered lentiviral vector stocks was assessed by p24 ELISA (Cell Biolabs), and gene-transfer efficiency (functional titer) was assessed by standard lentiviral vector titration methods. Typical yields of lentiviral vector stocks ranged from 7-15 ug/ml of p24 antigen, and functional titers ranged from 1-3×10e8 TU/ml. The SCT1-h16.13, SCT1-h16.15 and SCT1-h16.25 lentiviral vector stocks were frozen and stored until use.

[0337] As set forth in the subsequent Examples, the vector stocks may be used to induce a desired immune response as discussed in detail throughout the instant application and shown schematically in FIG. 5 appended hereto. Moreover, while SCT1-h16.13, SCT1-h16.15 and SCT1-h16.25 are used as an exemplary constructs to demonstrate various facets of the instant invention (and may be called out in the FIGS.), it will be appreciated that the true scope of the invention is not limited to any particular DLL3 binding domain or particular signaling domain or any exemplary construct thereof, but rather encompasses any DLL3 CAR that effects the desired immune response upon exposure to a DLL3 expressing tumor cell.

### Example 8

### Generation of Immortalized T Lymphocytes

### Expressing SCT1-h16.13, SCT1-h16.15, or SCT1-h16.25 CAR Protein

[0338] DLL3 target-specific Jurkat lymphocytes expressing either SCT1-h16.13, SCT1-h16.15 or SCT1-h16.25 were generated by transducing one million Jurkat E6-1 (ATCC) T lymphocyte cells with the subject SCT1-h16 lentiviral vector from the previous Example at a multiplicity of infection (MOI) of ˜4 in the presence of 10 ug/ml of polybrene (EMD Millipore) to ensure efficient viral transduction. The cells were allowed to incubate in the presence of lentiviral particles for seventy-two hours at 37° C. (5% CO₂). Afterwards, the spent media was exchanged with fresh media containing 2 ug/ml Puromcyin (Life Technologies) to positively select for SCT1-h16 CAR expressing cells. Cells were allowed to incubate an additional 5 days in the presence of Puromycin prior to assessing the anti-DLL3 CAR surface expression by flow cytometry (FIG. 6A). Flow cytometry was also used to detect the presence of hDLL3 protein on the surface of an engineered HEK-293T cell line overexpressing hDLL3 (FIG. 6B) that will be used to characterize CAR constructs of the instant invention.

[0339] Flow cytometry analysis of transduced Jurkat cells expressing either SCT1-h16.13, SCT1-h16.15 or SCT1-h16.25 and non-transduced Jurkat control cells was performed as follows: 10⁶ cells of each cell line were harvested and pelleted by centrifugation at 1200 rpm at 4° C. for 5 minutes; supernatant was removed and the pellet was washed in cold PBS/2% FCS twice. After supernatant from the final wash was removed, the cell pellet was resuspended in 100 microliters of PBS/2% FCS containing 1 microgram of Alexa Fluor® 647-conjugated Affinipure Goat Anti-Human IgG, F(ab′) antibody (Jackson ImmunoResearch) and incubated in the dark at 4° C. for 30 minutes. After incubation, cells were washed three times in PBS/2% FCS before being re-suspended in PBS/2% FCS with DAPI (to detect living cells). The cells were then analyzed on a BD FACS Canto II flow cytometer as per the manufacturer's instructions to provide the data set forth in FIG. 6A.

[0340] Similarly, HEK-293T parental cells or HEK-293T cells overexpressing hDLL3 were harvested and isolated into single cell suspensions with Versene (Life Technologies). The isolated cells were washed as described above and incubated for 30 minutes at 4° C. in the dark with 1 microgram of anti-DLL3 antibody prior to thrice washing in PBS/2% FCS. The cells were then incubated for 30 minutes with 50 μL per sample AlexaFluor-647 labeled goat-anti-mouse IgG, Fc fragment specific secondary antibody (Life Technologies) diluted 1:200 in PBS/2% FCS, washed thrice with PBS/2% FCS and re-suspended in PBS/2% FCS with DAPI (to detect living cells). The cells were then analyzed on a BD FACS Canto II flow cytometer as per the manufacturer's instructions to provide the data set forth in FIG. 6B.

[0341] FIGS. 6A and 6B, respectively, demonstrate that the subject SCT1-h16 CAR is expressed on transduced Jurkat T lymphocytes but not on non-transduced Jurkat cells, and that human DLL3 protein is expressed on the engineered HEK-293T cells but not on HEK-293T-Naïve cells.

### Example 9

### Jurkat-SCT1-h16.15 T Lymphocytes Induce

### IL-2 Production Upon Contacting hDLL3 Expressing Cells

[0342] Transduced Jurkat-SCT1-h16.13, Jurkat-SCT1-h16.15, and Jurkat-SCT1-h16.25 lymphocytes were assessed for target-specific activation by measuring IL-2 induction which is indicative of CAR mediated T-cell activation. More specifically, using transduced Jurkat lymphocytes and engineered 293T cells expressing hDLL3 from the previous Example, IL2 levels were monitored to demonstrate that the CAR expressing lymphocytes are activated and mount an immune response upon contact with cells expressing hDLL3.

[0343] In this regard Jurkat-SCT1-h16.15 lymphocytes from Example 8 were co-cultured with HEK-293T cells engineered to over-express hDLL3 antigen on the cell surface (also from Example 8) as evidenced by flow cytometry. Co-culturing of lymphocytes with target HEK-293T-hDLL3 cells was performed at the four different lymphocyte: target (L:T) ratios set forth in FIG. 7A to assess dose response and determine maximum IL-2 production conditions. Co-cultures were incubated at 37° C. (5% CO₂) for 48 hrs, at which time media was harvested and clarified of cell debris by centrifugation at 1200 rpm for 5 minutes. Clarified supernatant was then assessed for IL-2 production by ELISA (Thermo Scientific) per manufacturer's instructions. To assess background IL-2 production, non-transduced Jurkat cells (Jurkat-Naïve) were co-cultured with HEK-293T-hDLL3 cells. The results, in terms of IL2 induction, is shown in FIG. 7A.

[0344] Similarly three different SCT1-h16 lymphocytes (Jurkat-SCT1-h16.13, Jurkat-SCT1-h16.15, and Jurkat-SCT1-h16.25) from Example 8 were co-cultured with engineered hDLL3+HEK-293T cells at a 3:1 L:T ratio substantially as set forth immediately above. Results, again in terms of IL2 induction, are shown in FIG. 7B.

[0345] As evidenced by the data set forth in FIG. 7A, the Jurkat-SCT1-h16.15 lymphocytes were prompted to produce IL-2 in a concentration dependent manner upon exposure to cells expressing hDLL3. Additionally, data shown in FIG. 7B demonstrates the ability of various DLL3 CAR constructs to consistently induce the production of IL2 when exposed to antigen presenting cells. More particularly it will be appreciated that such IL-2 production is indicative of T-cell activation by the SCT1 CAR upon recognition of DLL3 antigen on hDLL3 expressing cells (including hDLL3 expressing tumorigenic cells). With regard to both FIGS. 7A and 7B target-specific CAR-mediated activation of Jurkat cells is further elucidated by the lack of observable IL-2 production among co-cultures containing HEK-293T-DLL3 and non-transduced Jurkat cells.

### Example 10

### Generation of Primary T Lymphocytes Expressing

### SCT1-h16.13, SCT1-h16.15, or SCT1-h16.25 CAR Protein

[0346] In order to demonstrate that the disclosed CARs may be used to provide sensitized lymphocytes primary human CD3+T lymphocytes were isolated from a commercially available peripheral blood mononuclear cell preparation (PBMCs: AIICells) using a human CD3 positive selection kit (Stemcell Technologies).

[0347] Following isolation from a single donor CD3+ T cells were cultured in RPMI media containing 10% heat-inactivated fetal bovine serum (Hyclone), 1% penicillin/streptomycin (Corning), 1% I-glutamine (Corning), and 10 mM HEPES (Corning). T lymphocytes were incubated at 37° C. (5% CO₂) in the presence of CD3/CD28 activation beads (Dynabeads) at a 1:5 ratio for activation. IL-2 (Peprotech) was added every other day to a final concentration of 50 IU/ml. Twenty-four hours after initial activation, DLL3 target-specific T lymphocytes expressing SCT1-h16.13, SCT1-h16.15, or SCT1-h16.25 were generated by transducing one million T cells with the CAR lentiviral vectors generated substantially as set forth in Example 7 at a multiplicity of infection (MOI) of ˜5 in the presence of 10 ug/ml of polybrene (EMD Millipore) to ensure efficient viral transduction. The cells were allowed to incubate in the presence of lentiviral particles for seventy-two hours at 37° C. (5% CO₂) prior to assessing the anti-DLL3 CAR surface expression by flow cytometry.

[0348] Flow cytometry analysis of transduced T lymphocytes expressing SCT1-h16.13, SCT1-h16.15 or SCT1-h16.25 and non-CAR-bearing T lymphocyte control cells was performed as follows: 10⁶ cells of each sample were harvested and pelleted by centrifugation at 1200 rpm at 4° C. for 5 minutes; supernatant was removed and the pellet was washed in cold PBS/2% FCS twice. After supernatant from the final wash was removed, the cell pellet was resuspended in 100 microliters of PBS/2% FCS containing 1 microgram of Alexa Fluor® 647-conjugated Affinipure Goat Anti-Human IgG, F(ab′) antibody (Jackson ImmunoResearch) and incubated in the dark at 4° C. for 30 minutes. After incubation, cells were washed thrice in PBS/2% FCS before being re-suspended in PBS/2% FCS with DAPI (to detect living cells). The cells were then analyzed on a BD FACS Canto II flow cytometer as per the manufacturer's instructions to provide the data set forth in FIG. 8.

[0349] FIG. 8 clearly shows that SCT1-h16.13, SCT1-h16.15 and SCT1-h16.25 are expressed on transduced primary T lymphocytes (i.e., sensitized lymphocytes) but not on non-transduced lymphocytes.

### Example 11

### Generation and Characterization of Cells Expressing DLL3 Target Antigen

[0350] As set forth in Example 8 flow cytometry was used to detect the presence of DLL3 protein on the surface of an engineered HEK-293T cell line overexpressing human DLL3. Similarly flow cytometry was used to confirm the expression of human DLL3 on a patient-derived xenograph (PDX) tumor cell line (LU64). Both the artificially engineered 293T cell line and the derived small cell cancer cell line were used to characterize sensitized lymphocytes of the instant invention.

[0351] More particularly HEK-293T cells overexpressing human DLL3 (293T-DLL3) were harvested and isolated into single cell suspensions with Versene (Life Technologies). Similarly, freshly harvested LU64 PDX tumors were processed into single cell suspension using a tumor dissociation kit (Mylteni Biotec). Isolated cells were washed as described herein and incubated for 30 minutes at 4° C. in the dark with 1 microgram of anti-DLL3 antibody or isotype control prior to thrice washing in PBS/2% FCS. The cells were then incubated for 30 minutes with 50 microliters per sample of AlexaFluor-647 labeled goat-anti-mouse IgG, Fc fragment specific secondary antibody (Life Technologies) diluted 1:200 in PBS/2% FCS, washed thrice with PBS/2% FCS and resuspended in PBS/2% FCS with DAPI (to detect living cells). Cells were then analyzed on a BD FACS Canto II flow cytometer as per the manufacturer's instructions to provide the data set forth in FIGS. 9A and 9B.

[0352] The resulting FIGS. show that human DLL3 protein is expressed both on the engineered HEK-293T cells (FIG. 9A) and LU64 PDX tumor cells (FIG. 9B).

### Example 12

### SCT1-h16.13, SCT1-h16.15 and SCT1-h16.25

### Primary Lymphocytes Eliminate DLL3 Expressing Cells Upon Exposure

[0353] To demonstrate the ability of DLL3 sensitized primary lymphocytes to kill cells in a target-specific manner, CAR transduced cells of the instant invention (prepared substantially as set forth in Example 10) were exposed to engineered 293 cells expressing DLL3 (along with appropriate controls). Following exposure the number of living target cells remaining were calculated with the results being set forth in FIG. 10.

[0354] More specifically primary T lymphocytes expressing anti-DLL3 CARs (SCT1-h16.13, SCT1-h16.15 and SCT1-h16.25) were co-cultured with 293T-DLL3 cells at an lymphocyte-to-target (L:T) ratio of 3:1. Co-cultures were incubated at 37° C. (5% CO₂) for 48 hrs prior to determination percentage of remaining viable DLL3-bearing cells.

[0355] The percentage of live cells was calculated as follows: co-cultures were harvested and washed as set forth herein prior to incubation for 30 minutes at 4° C. in the dark with 1 microgram of anti-DLL3 antibody or isotype control followed by thrice washing in PBS/2% FCS. Cells were then incubated for 30 minutes with 50 microliters per sample of AlexaFluor-647 labeled goat-anti-mouse IgG, Fc fragment-specific secondary antibody (Life Technologies) diluted 1:200 in PBS/2% FCS. Cells were washed three times with PBS/2% FCS, followed by resuspension in 200 microliters of PBS/2% FCS containing DAPI (Life Technologies) for cell viability discrimination, and 10000 absolute counting beads (Life Technologies) for normalizing cell counts. Analysis and enumeration of remaining viable DLL3-bearing target cells was performed on a BD FACS Canto II flow cytometer by quantifying the respective number of viable DLL3-bearing cells per 7500 absolute counting beads collected. Viable target cells remaining in presence of non-CAR-bearing T lymphocytes was used as the benchmark to compare target-specific killing of DLL3-bearing cells by DLL3 sensitized lymphocytes.

[0356] As shown in FIG. 10, SCT1-16.15 exhibited significant target-specific killing while SCT1-h16.13 and SCT1-h16.25 showed more moderate target-specific killing. The immunospecificity of killing mediated by the sensitized lymphocytes is evidenced by the lack of activity shown by the non-transduced primary T lymphocytes co-cultured with DLL3+ target cells (FIG. 10). These data demonstrate the target-specific activity among sensitized lymphocytes expressing various anti-DLL3 CARs.

### Example 13

### SCT1-h16.15 Primary T Lymphocytes

### Induce Cytokine Production Upon Contacting DLL3-Expressing Cells

[0357] In order to demonstrate that the disclosed CARs may be used to provide sensitized lymphocytes from various donors, primary human CD3+T lymphocytes were isolated from commercially available peripheral blood mononuclear cell preparations (PBMCs: AIICells) using a human CD3 positive selection kit (Stemcell Technologies) and transduced. The resulting sensitized lymphocyte compositions comprising SCT1-h16.15 and PBMCs obtained from two different donors (donor 1 and donor 2) were assessed for CAR expression (FIG. 11) and target-specific activation by measuring TNFα and IFNγ induction upon contact with DLL3-expressing target cells. It will be appreciated that cytokine production (e.g., TNFα and IFNγ induction) is indicative of active chimeric antigen receptors that are capable of inducing an anti-tumor immune response.

[0358] More particularly, PMBC preparations from two different donors (donor 1 and donor 2) were used to provide CD3+T lymphocyte preparations substantially as set forth in Example 10. The respective lymphocyte preparations were then transduced with SCT1-h16.15 (again as set forth in Example 10) to provide donor 1 and donor 2 DLL3 sensitized lymphocyte preparations (along with non-transduced lymphocytes as controls). FIG. 11 shows that each of the lymphocyte preparations effectively express the DLL3 CAR as determined by flow cytometry performed as set forth above.

[0359] The resulting sensitized lymphocytes comprising host cells from the two different donors were the exposed to DLL3+293T cells and small cell lung cancer cells expressing DLL3 (both from Example 11). In this regard each of the sensitized lymphocyte preparations (with controls) were then co-cultured with either 293T-DLL3 or LU64 PDX target cells at a lymphocyte to target (L:T) ratio of 3:1. Co-cultures were incubated at 37° C. (5% CO₂) for 48 hrs, at which time media was harvested and clarified of cell debris by centrifugation at 1200 rpm for 5 minutes. Clarified supernatant was then assessed for TNFα production by ELISA (Thermo Fisher) and IFNg by ELISA (Invitrogen) per manufacturer's instructions. The resulting measurements for levels of TNFα and IFNγ are shown, respectively, in FIGS. 12A and 12B (TNFα) and FIGS. 13A and 13B (IFNγ) where higher cytokine production is indicative of more robust signaling from the CAR.

[0360] As evidenced by the data set forth in FIG. 12A (293 cells) and 12B (tumor cells) and FIG. 13A (293 cells) and 13B (tumor cells) both preparations of the SCT1-h16.15-bearing T lymphocytes were prompted to produce TNFα and IFNγ upon exposure to cells (engineered and tumor) expressing human DLL3, whereas the non-CAR-bearing T lymphocytes exhibited minimal TNFα and IFNγ induction when co-cultured with the same target cells. This confirms that DLL3 sensitized lymphocytes from different donors are active and capable of generating immunostimulatory signals upon exposure to DLL3+ tumor cells.

### Example 14

### Targeted Killing of DLL3-Expressing Cells In Vitro by SCT1-h16.15-T Lymphocytes

[0361] To demonstrate the ability of DLL3 sensitized lymphocytes to kill cells in a target-specific manner, CAR transduced cells of the instant invention were exposed to engineered 293 cells and tumor cells expressing DLL3 (again from Example 11). Following exposure the number of living target cells remaining were calculated with the results being set forth in FIG. 14A (293 cells) and 14B (tumor cells).

[0362] More particularly SCT1-h16.15 sensitized lymphocytes (prepared as per Example 13 with host cells from two donors) were co-cultured with either 293T-DLL3 or LU64 PDX cells at an lymphocyte to target (L:T) ratio of 3:1. Co-cultures were incubated at 37° C. (5% CO₂) for 48 hrs prior to determination of remaining viable DLL3-bearing cells.

[0363] The percentage of live cells was calculated as follows: co-cultures were harvested and washed as set forth herein prior to incubation for 30 minutes at 4° C. in the dark with 1 microgram of anti-DLL3 antibody or isotype control followed by thrice washing in PBS/2% FCS. Cells were then incubated for 30 minutes with 50 microliters per sample of AlexaFluor-647 labeled goat-anti-mouse IgG, Fc fragment-specific secondary antibody (Life Technologies) diluted 1:200 in PBS/2% FCS. Cells were washed three times with PBS/2% FCS, followed by resuspension in 200 microliters of PBS/2% FCS containing DAPI (Life Technologies) for cell viability discrimination, and 10000 absolute counting beads (Life Technologies) for normalizing cell counts. Analysis and enumeration of remaining viable DLL3-bearing target cells was performed on a BD FACS Canto II flow cytometer by quantifying the respective number of viable DLL3-bearing cells per 7500 absolute counting beads collected. Viable target cells remaining in presence of non-CAR-bearing T lymphocytes was used as the benchmark to compare target-specific killing of DLL3-bearing cells by SCT1-h16.15 sensitized lymphocytes.

[0364] As shown in FIG. 14A (293 cells) and 14B (tumor cells) the DLL3+ cells exhibited significant susceptibility to cytolysis by the sensitized lymphocytes derived from both donors with approximately 99% of target cells being eliminated. The DLL3 sensitized lymphocytes were also able to eliminate a substantial majority (approximately 70% to 80%) of LU64 PDX small cell lung cancer cells. Overall, these data demonstrate that the disclosed DLL3 sensitized lymphocytes are able to effectively eliminate DLL3+ cells, including DLL3+ tumor cells in a target-specific manner.

[0365] Those skilled in the art will further appreciate that the present invention may be embodied in other specific forms without departing from the spirit or central attributes thereof. In that the foregoing description of the present invention discloses only exemplary embodiments thereof, it is to be understood that other variations are contemplated as being within the scope of the present invention. Accordingly, the present invention is not limited to the particular embodiments that have been described in detail herein. Rather, reference should be made to the appended claims as indicative of the scope and content of the invention.

1. A chimeric antigen receptor comprising an anti-DLL3 binding domain.

2. The chimeric antigen receptor of claim 1 wherein the anti-DLL3 binding domain comprises a scFv anti-DLL3 binding domain.

3. The chimeric antigen receptor of claim 1 or 2 wherein the scFv anti-DLL3 binding domain is derived from, comprises or competes for binding with an antibody comprising: a light chain variable region (VL) of SEQ ID NO: 21 and a heavy chain variable region (VH) of SEQ ID NO: 23; or a VL of SEQ ID NO: 25 and a VH of SEQ ID NO: 27; or a VL of SEQ ID NO: 29 and a VH of SEQ ID NO: 31; or a VL of SEQ ID NO: 33 and a VH of SEQ ID NO: 35; or a VL of SEQ ID NO: 37 and a VH of SEQ ID NO: 39; or a VL of SEQ ID NO: 41 and a VH of SEQ ID NO: 43; or a VL of SEQ ID NO: 45 and a VH of SEQ ID NO: 47; or a VL of SEQ ID NO: 49 and a VH of SEQ ID NO: 51; or a VL of SEQ ID NO: 53 and a VH of SEQ ID NO: 55; or a VL of SEQ ID NO: 57 and a VH of SEQ ID NO: 59; or a VL of SEQ ID NO: 61 and a VH of SEQ ID NO: 63; or a VL of SEQ ID NO: 65 and a VH of SEQ ID NO: 67; or a VL of SEQ ID NO: 69 and a VH of SEQ ID NO: 71; or a VL of SEQ ID NO: 73 and a VH of SEQ ID NO: 75; or a VL of SEQ ID NO: 77 and a VH of SEQ ID NO: 79; or a VL of SEQ ID NO: 81 and a VH of SEQ ID NO: 83; or a VL of SEQ ID NO: 85 and a VH of SEQ ID NO: 87; or a VL of SEQ ID NO: 89 and a VH of SEQ ID NO: 91; or a VL of SEQ ID NO: 93 and a VH of SEQ ID NO: 95; or a VL of SEQ ID NO: 97 and a VH of SEQ ID NO: 99; or a VL of SEQ ID NO: 101 and a VH of SEQ ID NO: 103; or a VL of SEQ ID NO: 105 and a VH of SEQ ID NO: 107; or a VL of SEQ ID NO: 109 and a VH of SEQ ID NO: 111; or a VL of SEQ ID NO: 113 and a VH of SEQ ID NO: 115; or a VL of SEQ ID NO: 117 and a VH of SEQ ID NO: 119; or a VL of SEQ ID NO: 121 and a VH of SEQ ID NO: 123; or a VL of SEQ ID NO: 125 and a VH of SEQ ID NO: 127; or a VL of SEQ ID NO: 129 and a VH of SEQ ID NO: 131; or a VL of SEQ ID NO: 133 and a VH of SEQ ID NO: 135; or a VL of SEQ ID NO: 137 and a VH of SEQ ID NO: 139; or a VL of SEQ ID NO: 141 and a VH of SEQ ID NO: 143; or a VL of SEQ ID NO: 145 and a VH of SEQ ID NO: 147; or a VL of SEQ ID NO: 149 and a VH of SEQ ID NO: 151; or a VL of SEQ ID NO: 153 and a VH of SEQ ID NO: 155; or a VL of SEQ ID NO: 157 and a VH of SEQ ID NO: 159; or a VL of SEQ ID NO: 161 and a VH of SEQ ID NO: 163; or a VL of SEQ ID NO: 165 and a VH of SEQ ID NO: 167; or a VL of SEQ ID NO: 169 and a VH of SEQ ID NO: 171; or a VL of SEQ ID NO: 173 and a VH of SEQ ID NO: 175; or a VL of SEQ ID NO: 177 and a VH of SEQ ID NO: 179; or a VL of SEQ ID NO: 181 and a VH of SEQ ID NO: 183; or a VL of SEQ ID NO: 185 and a VH of SEQ ID NO: 187; or a VL of SEQ ID NO: 189 and a VH of SEQ ID NO: 191; or a VL of SEQ ID NO: 193 and a VH of SEQ ID NO: 195; or a VL of SEQ ID NO: 197 and a VH of SEQ ID NO: 199; or a VL of SEQ ID NO: 201 and a VH of SEQ ID NO: 203; or a VL of SEQ ID NO: 205 and a VH of SEQ ID NO: 207; or a VL of SEQ ID NO: 209 and a VH of SEQ ID NO: 211; or a VL of SEQ ID NO: 213 and a VH of SEQ ID NO: 215; or a VL of SEQ ID NO: 217 and a VH of SEQ ID NO: 219; or a VL of SEQ ID NO: 221 and a VH of SEQ ID NO: 223; or a VL of SEQ ID NO: 225 and a VH of SEQ ID NO: 227; or a VL of SEQ ID NO: 229 and a VH of SEQ ID NO: 231; or a VL of SEQ ID NO: 233 and a VH of SEQ ID NO: 235; or a VL of SEQ ID NO: 237 and a VH of SEQ ID NO: 239; or a VL of SEQ ID NO: 241 and a VH of SEQ ID NO: 243; or a VL of SEQ ID NO: 245 and a VH of SEQ ID NO: 247; or a VL of SEQ ID NO: 249 and a VH of SEQ ID NO: 251; or a VL of SEQ ID NO: 253 and a VH of SEQ ID NO: 255; or a VL of SEQ ID NO: 257 and a VH of SEQ ID NO: 259; or a VL of SEQ ID NO: 261 and a VH of SEQ ID NO: 263; or a VL of SEQ ID NO: 265 and a VH of SEQ ID NO: 267; or a VL of SEQ ID NO: 269 and a VH of SEQ ID NO: 271; or a VL of SEQ ID NO: 273 and a VH of SEQ ID NO: 275; or a VL of SEQ ID NO: 277 and a VH of SEQ ID NO: 279; or a VL of SEQ ID NO: 281 and a VH of SEQ ID NO: 283; or a VL of SEQ ID NO: 285 and a VH of SEQ ID NO: 287; or a VL of SEQ ID NO: 289 and a VH of SEQ ID NO: 291; or a VL of SEQ ID NO: 293 and a VH of SEQ ID NO: 295; or a VL of SEQ ID NO: 297 and a VH of SEQ ID NO: 299; or a VL of SEQ ID NO: 301 and a VH of SEQ ID NO: 303; or a VL of SEQ ID NO: 305 and a VH of SEQ ID NO: 307; or a VL of SEQ ID NO: 309 and a VH of SEQ ID NO: 311; or a VL of SEQ ID NO: 313 and a VH of SEQ ID NO: 315; or a VL of SEQ ID NO: 317 and a VH of SEQ ID NO: 319; or a VL of SEQ ID NO: 321 and a VH of SEQ ID NO: 323; or a VL of SEQ ID NO: 325 and a VH of SEQ ID NO: 327; or a VL of SEQ ID NO: 329 and a VH of SEQ ID NO: 331; or a VL of SEQ ID NO: 333 and a VH of SEQ ID NO: 335; or a VL of SEQ ID NO: 337 and a VH of SEQ ID NO: 339; or a VL of SEQ ID NO: 341 and a VH of SEQ ID NO: 343; or a VL of SEQ ID NO: 345 and a VH of SEQ ID NO: 347; or a VL of SEQ ID NO: 349 and a VH of SEQ ID NO: 351; or a VL of SEQ ID NO: 353 and a VH of SEQ ID NO: 355; or a VL of SEQ ID NO: 357 and a VH of SEQ ID NO: 359; or a VL of SEQ ID NO: 361 and a VH of SEQ ID NO: 363; or a VL of SEQ ID NO: 365 and a VH of SEQ ID NO: 367; or a VL of SEQ ID NO: 369 and a VH of SEQ ID NO: 371; or a VL of SEQ ID NO: 373 and a VH of SEQ ID NO: 375; or a VL of SEQ ID NO: 377 and a VH of SEQ ID NO: 379; or a VL of SEQ ID NO: 381 and a VH of SEQ ID NO: 383; or a VL of SEQ ID NO: 385 and a VH of SEQ ID NO: 387; or a VL of SEQ ID NO: 389 and a VH of SEQ ID NO: 391; or a VL of SEQ ID NO: 393 and a VH of SEQ ID NO: 395; or a VL of SEQ ID NO: 397 and a VH of SEQ ID NO: 399; or a VL of SEQ ID NO: 401 and a VH of SEQ ID NO: 403; or a VL of SEQ ID NO: 405 and a VH of SEQ ID NO: 407.

4. The chimeric antigen receptor of any one of claims 1-3 comprising an intracellular domain comprising a 4-1BB signaling domain and/or a CD3ζ signaling domain.

5. The chimeric antigen receptor of any one of claims 1-4 comprising a transmembrane domain comprising a human CD8a hinge.

6. A pharmaceutical composition comprising a chimeric antigen receptor of any one of claims 1-5 and a pharmaceutically acceptable carrier

7. A polynucleotide encoding a chimeric antigen receptor of any one of claims 1 to 5.

8. A vector comprising a polynucleotide of claim 7.

9. The vector of claim 8 wherein the vector comprises a viral vector.

10. The vector of claim 9 wherein the viral vector comprises a lentiviral vector or a retroviral vector.

11. A pharmaceutical composition comprising a polynucleotide of claim 7 or a vector of any one of claims 8 to 10.

12. An isolated host cell comprising a chimeric antigen receptor of any one of claims 1 to 5.

13. The isolated host cell of claim 12 wherein the host cell comprises a DLL3 sensitized lymphocyte.

14. The isolated host cell of claim 13 wherein the DLL3 sensitized lymphocyte comprises an autologous cell obtained from a patient.

15. The isolated host cell of claim 13 wherein the DLL3 sensitized lymphocyte comprises an allogeneic cell.

16. The isolated host cell of claim 13 wherein the DLL3 sensitized lymphocyte comprises a T cell or a NK cell.

17. The isolated host cell of claim 16 wherein the T cell comprises a CD8+ T cell.

18. The isolated host cell of claim 16 wherein the DLL3 sensitized lymphocyte comprises a NK cell.

19. A pharmaceutical composition comprising a host cell of any one of claims 12 to 18.

20. A method of treating a patient suffering from cancer comprising the step of administering a pharmaceutical composition of claim 19.

21. The method of claim 20 wherein the patient is suffering from a cancer selected from the group consisting of lung cancer, melanoma, breast cancer, prostate cancer, colon cancer, renal cell carcinoma, ovarian cancer, neuroblastoma, rhabdomyosarcoma, leukemia and lymphoma.

22. The method of claim 21 wherein the cancer is lung cancer and the lung cancer is small cell lung cancer.

23. A method of producing a DLL3 sensitized lymphocyte comprising the step of transforming a lymphocyte with a DLL3 CAR.

24. A method of producing a DLL3 sensitized lymphocyte comprising the step of transducing a lymphocyte with a DLL3 CAR.

25. A method of producing a DLL3 sensitized lymphocyte comprising the step of transfecting a lymphocyte with a DLL3 CAR.

26. An article of manufacture comprising a receptacle containing a DLL3 sensitized lymphocyte and a pharmaceutically acceptable carrier.

27. An article of manufacture comprising a receptacle containing a pharmaceutical composition of claim 11.

28. The article of manufacture of claim 27 wherein the pharmaceutical composition comprises a viral vector.

29. An article of manufacture comprising a receptacle containing a pharmaceutical composition of claim 19.

30. The article of manufacture of any one of claims 26 to 29 wherein the receptacle comprises a syringe, an infusion bag or a vial.

The application's sequence listing, which the Patent Office published only in electronic form, follows.

SEQUENCE LISTING (437 sequences)

SEQ ID NO: 1 - protein, 618 aa, Homo sapiens
MVSPRMSGLLSQTVILALIFLPQTRPAGVFELQIHSFGPGPGPGAPRSPCSARLPCRLFFRVCLKPGLSEEAAESPCALGAALSARGPVYTEQPGAPAPDLPLPDGLLQVPFRDAWPGTFSFIIETWREELGDQIGGPAWSLLARVAGRRRLAAGGPWARDIQRAGAWELRFSYRARCEPPAVGTACTRLCRPRSAPSRCGPGLRPCAPLEDECEAPLVCRAGCSPEHGFCEQPGECRCLEGWTGPLCTVPVSTSSCLSPRGPSSATTGCLVPGPGPCDGNPCANGGSCSETPRSFECTCPRGFYGLRCEVSGVTCADGPCFNGGLCVGGADPDSAYICHCPPGFQGSNCEKRVDRCSLQPCRNGGLCLDLGHALRCRCRAGFAGPRCEHDLDDCAGRACANGGTCVEGGGAHRCSCALGFGGRDCRERADPCAARPCAHGGRCYAHFSGLVCACAPGYMGARCEFPVHPDGASALPAAPPGLRPGDPQRYLLPPALGLLVAAGVAGAALLLVHVRRRGHSQDAGSRLLAGTPEPSVHALPDALNNLRTQEGSGDGPSSSVDWNRPEDVDPQGIYVISAPSIYAREVATPLFPPLHTGRAGQRQHLLFPYPSSILSVK

SEQ ID NO: 2 - protein, 587 aa, Homo sapiens
MVSPRMSGLLSQTVILALIFLPQTRPAGVFELQIHSFGPGPGPGAPRSPCSARLPCRLFFRVCLKPGLSEEAAESPCALGAALSARGPVYTEQPGAPAPDLPLPDGLLQVPFRDAWPGTFSFIIETWREELGDQIGGPAWSLLARVAGRRRLAAGGPWARDIQRAGAWELRFSYRARCEPPAVGTACTRLCRPRSAPSRCGPGLRPCAPLEDECEAPLVCRAGCSPEHGFCEQPGECRCLEGWTGPLCTVPVSTSSCLSPRGPSSATTGCLVPGPGPCDGNPCANGGSCSETPRSFECTCPRGFYGLRCEVSGVTCADGPCFNGGLCVGGADPDSAYICHCPPGFQGSNCEKRVDRCSLQPCRNGGLCLDLGHALRCRCRAGFAGPRCEHDLDDCAGRACANGGTCVEGGGAHRCSCALGFGGRDCRERADPCAARPCAHGGRCYAHFSGLVCACAPGYMGARCEFPVHPDGASALPAAPPGLRPGDPQRYLLPPALGLLVAAGVAGAALLLVHVRRRGHSQDAGSRLLAGTPEPSVHALPDALNNLRTQEGSGDGPSSSVDWNRPEDVDPQGIYVISAPSIYAREA

SEQ ID NO: 3 - protein, 5 aa, Homo sapiens
QPGAP

SEQ ID NO: 4 - protein, 4 aa, Homo sapiens
  misc_feature (2)..(2): Xaa can be any naturally occurring amino acid
GXRP

SEQ ID NO: 5 - protein, 107 aa, Homo sapiens [sequence omitted]

SEQ ID NO: 6 - protein, 329 aa, Homo sapiens
ASTKGPSVFPLAPSSKSTSGGTAALGCLVKDYFPEPVTVSWNSGALTSGVHTFPAVLQSSGLYSLSSVVTVPSSSLGTQTYICNVNHKPSNTKVDKKVEPKSCDKTHTCPPCPAPELLGGPSVFLFPPKPKDTLMISRTPEVTCVVVDVSHEDPEVKFNWYVDGVEVHNAKTKPREEQYNSTYRVVSVLTVLHQDWLNGKEYKCKVSNKALPAPIEKTISKAKGQPREPQVYTLPPSRDELTKNQVSLTCLVKGFYPSDIAVEWESNGQPENNYKTTPPVLDSDGSFFLYSKLTVDKSRWQQGNVFSCSVMHEALHNHYTQKSLSLSPG

SEQ ID NO: 7 - protein, 15 aa, Artificial Sequence
  Pentameric multimer linker
GGGGSGGGGSGGGGS

SEQ ID NO: 8 - protein, 236 aa, Artificial Sequence
  h16.15 scFv protein
AIQLTQSPSSLSASVGDRVTITCRASENIYYNLAWYQQKPGKAPKLLIYTANSLEDVPSRFSGSGSGTDFTLTISSLQPEDFATYFCKQAYDVPPTFGGGTKLEIKGGGGSGGGGSGGGGSQVQLVQSGAEVKKPGASVKVSCKASGYTFTRYWIHWIRQAPGQGLEWMGYINPTVYTEFNQNFKDRVTMTRDTSTSTVYMELSSLRSEDTAVYYCARGGSNFFDYWQGTTVTVSS

SEQ ID NO: 9 - DNA, 1452 bp, Artificial Sequence
  SCT1-h16.15 CAR DNA
atggccctgcctgtgacagccctgctgctgcctctggctctgctgctgcatgcggcgcgccccgccatccagttgacccagtctccatcctccctgtctgcatctgtaggagacagagtcaccatcacttgccgggcaagtgagaacatttactacaatttagcctggtatcagcagaaaccagggaaagctcctaagctcctgatctatactgccaatagtttggaagatggggtcccatcaaggttcagcggcagtggatctgggacagatttcactctcaccatcagcagcctgcagcctgaagattttgcaacttatttttgtaaacaggcttatgacgttcctccgacgttcggtggaggcaccaagctggaaatcaaaggcggcggaggatctggcggaggcggaagtggcggagggggatctcaggtgcagctggtgcagtctggggctgaggtgaagaagcctggggcctcagtgaaggtttcctgcaaggcatctggatacaccttcaccaggtactggatacactggatacgacaggcccctggacaagggcttgagtggatgggatacatcaaccctacaactgtttatactgagttcaatcagaacttcaaggacagagtcaccatgaccagggacacgtccacgagcacagtctacatggagctgagcagcctgagatctgaggacacggccgtgtattactgtgcgagaggcggtagtaacttctttgactactggggccaaggcaccactgtcacagtctcctcgaccacaacccctgcccccagacctcctacacccgcccctacaattgccagccagcctctgtctctgaggcccgaggcttgtagaccagctgctggcggagccgtgcacaccagaggactggatttcgcctgcgacatctacatctgggcccctctggccggcacatgtggcgtgctgctgctgagcctcgtgatcaccctgtactgcaagcggggcagaaagaaactgctgtacatctttaagcagcccttcatgcggcccgtgcagaccacccaggaagaggacggctgctcctgcagattccccgaggaagaagaaggcggctgcgagctgagagtgaagttcagcagatccgccgacgcccctgcctacaagcagggccagaaccagctgtacaacgagctgaacctgggcagacgggaagagtacgacgtgctggacaagcggagaggccgggatcctgaaatgggcggcaagcccagacggaagaacccccaggaaggcctgtataacgaactgcagaaagacaagatggccgaggcctacagcgagatcggaatgaagggcgagcggagaagaggcaagggccacgatggcctgtaccagggcctgagcaccgccaccaaggacacctatgacgccctgcacatgcaggccctgccacctagatga

SEQ ID NO: 10 - protein, 483 aa, Artificial Sequence
  SCT1-h16.15 CAR protein
MALPVTALLLPLALLLHAARPAIQLTQSPSSLSASVGDRVTITCRASENIYYNLAWYQQKPGKAPKLLIYTANSLEDGVPSRFSGSGSGTDFTLTISSLQPEDFATYFCKQAYDVPPTFGGGTKLEIKGGGGSGGGGSGGGGSQVQLVQSGAEVKKPGASVKVSCKASGYTFTRYWIHWIRQAPGQGLEWMGYINPTTVYTEFNQNFKDRVTMTRDTSTSTVYMELSSLRSEDTAVYYCARGGSNFFDYWGQGTTVTVSSTTTPAPRPPTPAPTIASQPLSLRPEACRPAAGGAVHTRGLDFACDIYIWAPLAGTCGVLLLSLVITLYCKRGRKKLLYIFKQPFMRPVQTTQEEDGCSCRFPEEEEGGCELRVKFSRSADAPAYKQGQNQLYNELNLGRREEYDVLDKRRGRDPEMGGKPRRKNPQEGLYNELQKDKMAEAYSEIGMKGERRRGKGHDGLYQGLSTATKDTYDALHMQALPPR

SEQ ID NO: 11 - DNA, 735 bp, Artificial Sequence
  h16.13 scFv DNA
gacatccagatgacccagtctccatcctccctgtctgcatctgtaggagacagagtcaccatcacttgcagtgcaagtagcagcgttagctatatgtattggtatcagcagaaaccagggaaagcccctaagctcctgatctacctcactagtaacttggcaagtggggtcccatcaaggttcagtggcagtggatctgggacagatttcactctcaccatcagcagtctgcaacctgaagattttgcaacttactactgtcaacagtggcgtagtaacccattcacgttcggccaggggacaaagttggaaataaaaggcggcggaggatctggcggaggcggaagtggcggagggggatctcagatcaccttgaaggagtctggtcctacgctggtgaaacccacacagaccctcacgctgacctgcaccttctctgggttctcactcagcactagtggaatgggtgtgggctggatccgtcagcccccaggaaaggccctggagtggcttgcacacatttggtgggatgatgttaagcgctacagcccatctctgaagagcaggctcaccatcaccaaggacacctccaaaaaccaggtggtccttacaatgaccaacatggaccctgtggacacagccacatattactgtgcacgcatagtttcctttgataacgacgttgtctctgctatggactactggggtcaaggaaccctagtcaccgtctcctcg

SEQ ID NO: 12 - protein, 245 aa, Artificial Sequence
  h16.13 scFv protein
DIQMTQSPSSLSASVGDRVTITCSASSSVSYMYWYQQKPGKAPKLLIYLTSNLASGVPSRFSGSGSGTDFTLTISSLQPEDFATYYCQQWRSNPFTFGQGTKLEIKGGGGSGGGGSGGGGSQITLKESGPTLVKPTQTLTLTCTFSGFSLSTSGMGVGWIRQPPGKALEWLAHIWWDDVKRYSPSLKSRLTITKDTSKNQVVLTMTNMDPVDTATYYCARIVSFDNDVVSAMDYWGQGTLVTVSS

SEQ ID NO: 13 - DNA, 735 bp, Artificial Sequence
  h16.25 scFv DNA
gaaattgtgctgactcagtctccagactttcagtctgtgactccaaaggagaaagtcaccatcacctgcagtgccagtagcagtgtgagctacatgcactggtaccagcagaaaccagatcagtctccaaagctcctcatcaaggatagttccaaactcgcctcaggggtcccctcgaggttcagtggcagtggatctgggacagatttcaccctcaccatcaatagcctggaagctgaagatgctgcaacgtattactgtcagcagtggagtagtaacccgctcacgttcggtcaggggaccaagctggagatcaaaggcggcggaggatctggcggaggcggaagtggcggagggggatctcagatcaccttgaaggagtctggtcctacgctggtgaaacccacacagaccctcacgctgacctgcaccttctctgggttctcactcagcactagtggaatgggtgtgggctggatccgtcagcccccaggaaaggccctggagtggcttacagacatttggtgggatgataataagtactacaacccatctctgaagagcaggctcaccatcaccaaggacacctccaaaaaccaggtggtccttacaatgaccaacatggaccctgtggacacagccacatattactgtgcacgaagagttaactattattacgacccgtactatgctatggactactggggtcaaggaaccctagtcaccgtctcctcg

SEQ ID NO: 14 - protein, 245 aa, Artificial Sequence
  sc16.25 scFv protein
EIVLTQSPDFQSVTPKEKVTITCSASSSVSYMHWYQQKPDQSPKLLIKDSSKLASGVPSRFSGSGSGTDFTLTINSLEAEDAATYYCQQWSSNPLTFGQGTKLEIKGGGGSGGGGSGGGGSQITLKESGPTLVKPTQTLTLTCTFSGFSLSTSGMGVGWIRQPPGKALEWLTDIWWDDNKYYNPSLKSRLTITKDTSKNQVVLTMTNMDPVDTATYYCARRVNYYYDPYYAMDYWGQGTLVTVSS

SEQ ID NO: 15 - DNA, 717 bp, Artificial Sequence
  h16.15 scFv DNA
gccatccagttgacccagtctccatcctccctgtctgcatctgtaggagacagagtcaccatcacttgccgggcaagtgagaacatttactacaatttagcctggtatcagcagaaaccagggaaagctcctaagctcctgatctatactgccaatagtttggaagatggggtcccatcaaggttcagcggcagtggatctgggacagatttcactctcaccatcagcagcctgcagcctgaagattttgcaacttatttttgtaaacaggcttatgacgttcctccgacgttcggtggaggcaccaagctggaaatcaaaggcggcggaggatctggcggaggcggaagtggcggagggggatctcaggtgcagctggtgcagtctggggctgaggtgaagaagcctggggcctcagtgaaggtttcctgcaaggcatctggatacaccttcaccaggtactggatacactggatacgacaggcccctggacaagggcttgagtggatgggatacatcaaccctacaactgtttatactgagttcaatcagaacttcaaggacagagtcaccatgaccagggacacgtccacgagcacagtctacatggagctgagcagcctgagatctgaggacacggccgtgtattactgtgcgagaggcggtagtaacttctttgactactggggccaaggcaccactgtcacagtctcctcg

SEQ ID NO: 16 - DNA, 1470 bp, Artificial Sequence
  SCT1-h16.13 CAR DNA
atggccctgcctgtgacagccctgctgctgcctctggctctgctgctgcatgcggcgcgccccgacatccagatgacccagtctccatcctccctgtctgcatctgtaggagacagagtcaccatcacttgcagtgcaagtagcagcgttagctatatgtattggtatcagcagaaaccagggaaagcccctaagctcctgatctacctcactagtaacttggcaagtggggtcccatcaaggttcagtggcagtggatctgggacagatttcactctcaccatcagcagtctgcaacctgaagattttgcaacttactactgtcaacagtggcgtagtaacccattcacgttcggccaggggacaaagttggaaataaaaggcggcggaggatctggcggaggcggaagtggcggagggggatctcagatcaccttgaaggagtctggtcctacgctggtgaaacccacacagaccctcacgctgacctgcaccttctctgggttctcactcagcactagtggaatgggtgtgggctggatccgtcagcccccaggaaaggccctggagtggcttgcacacatttggtgggatgatgttaagcgctacagcccatctctgaagagcaggctcaccatcaccaaggacacctccaaaaaccaggtggtccttacaatgaccaacatggaccctgtggacacagccacatattactgtgcacgcatagtttcctttgataacgacgttgtctctgctatggactactggggtcaaggaaccctagtcaccgtctcctcgaccacaacccctgcccccagacctcctacacccgcccctacaattgccagccagcctctgtctctgaggcccgaggcttgtagaccagctgctggcggagccgtgcacaccagaggactggatttcgcctgcgacatctacatctgggcccctctggccggcacatgtggcgtgctgctgctgagcctcgtgatcaccctgtactgcaagcggggcagaaagaaactgctgtacatctttaagcagcccttcatgcggcccgtgcagaccacccaggaagaggacggctgctcctgcagattccccgaggaagaagaaggcggctgcgagctgagagtgaagttcagcagatccgccgacgcccctgcctacaagcagggccagaaccagctgtacaacgagctgaacctgggcagacgggaagagtacgacgtgctggacaagcggagaggccgggatcctgaaatgggcggcaagcccagacggaagaacccccaggaaggcctgtataacgaactgcagaaagacaagatggccgaggcctacagcgagatcggaatgaagggcgagcggagaagaggcaagggccacgatggcctgtaccagggcctgagcaccgccaccaaggacacctatgacgccctgcacatgcaggccctgccacctagatga

SEQ ID NO: 17 - protein, 489 aa, Artificial Sequence
  SCT1-h16.13 CAR protein
MALPVTALLLPLALLLHAARPDIQMTQSPSSLSASVGDRVTITCSASSSVSYMYWYQQKPGKAPKLLIYLTSNLASGVPSRFSGSGSGTDFTLTISSLQPEDFATYYCQQWRSNPFTFGQGTKLEIKGGGGSGGGGSGGGGSQITLKESGPTLVKPTQTLTLTCTFSGFSLSTSGMGVGWIRQPPGKALEWLAHIWWDDVKRYSPSLKSRLTITKDTSKNQVVLTMTNMDPVDTATYYCARIVSFDNDVVSAMDYWGQGTLVTVSSTTTPAPRPPTPAPTIASQPLSLRPEACRPAAGGAVHTRGLDFACDIYIWAPLAGTCGVLLLSLVITLYCKRGRKKLLYIFKQPFMRPVQTTQEEDGCSCRFPEEEEGGCELRVKFSRSADAPAYKQGQNQLYNELNLGRREEYDVLDKRRGRDPEMGGKPRRKNPQEGLYNELQKDKMAEAYSEIGMKGERRRGKGHDGLYQGLSTATKDTYDALHMQALPPR

SEQ ID NO: 18 - DNA, 1470 bp, Artificial Sequence
  SCT1-h16.25 CAR DNA
atggccctgcctgtgacagccctgctgctgcctctggctctgctgctgcatgcggcgcgccccgaaattgtgctgactcagtctccagactttcagtctgtgactccaaaggagaaagtcaccatcacctgcagtgccagtagcagtgtgagctacatgcactggtaccagcagaaaccagatcagtctccaaagctcctcatcaaggatagttccaaactcgcctcaggggtcccctcgaggttcagtggcagtggatctgggacagatttcaccctcaccatcaatagcctggaagctgaagatgctgcaacgtattactgtcagcagtggagtagtaacccgctcacgttcggtcaggggaccaagctggagatcaaaggcggcggaggatctggcggaggcggaagtggcggagggggatctcagatcaccttgaaggagtctggtcctacgctggtgaaacccacacagaccctcacgctgacctgcaccttctctgggttctcactcagcactagtggaatgggtgtgggctggatccgtcagcccccaggaaaggccctggagtggcttacagacatttggtgggatgataataagtactacaacccatctctgaagagcaggctcaccatcaccaaggacacctccaaaaaccaggtggtccttacaatgaccaacatggaccctgtggacacagccacatattactgtgcacgaagagttaactattattacgacccgtactatgctatggactactggggtcaaggaaccctagtcaccgtctcctcgaccacaacccctgcccccagacctcctacacccgcccctacaattgccagccagcctctgtctctgaggcccgaggcttgtagaccagctgctggcggagccgtgcacaccagaggactggatttcgcctgcgacatctacatctgggcccctctggccggcacatgtggcgtgctgctgctgagcctcgtgatcaccctgtactgcaagcggggcagaaagaaactgctgtacatctttaagcagcccttcatgcggcccgtgcagaccacccaggaagaggacggctgctcctgcagattccccgaggaagaagaaggcggctgcgagctgagagtgaagttcagcagatccgccgacgcccctgcctacaagcagggccagaaccagctgtacaacgagctgaacctgggcagacgggaagagtacgacgtgctggacaagcggagaggccgggatcctgaaatgggcggcaagcccagacggaagaacccccaggaaggcctgtataacgaactgcagaaagacaagatggccgaggcctacagcgagatcggaatgaagggcgagcggagaagaggcaagggccacgatggcctgtaccagggcctgagcaccgccaccaaggacacctatgacgccctgcacatgcaggccctgccacctagatga

SEQ ID NO: 19 - protein, 489 aa, Artificial Sequence
  SCT1-h16.25 CAR protein
MALPVTALLLPLALLLHAARPEIVLTQSPDFQSVTPKEKVTITCSASSSVSYMHWYQQKPDQSPKLLIKDSSKLASGVPSRFSGSGSGTDFTLTINSLEAEDAATYYCQQWSSNPLTFGQGTKLEIKGGGGSGGGGSGGGGSQITLKESGPTLVKPTQTLTLTCTFSGFSLSTSGMGVGWIRQPPGKALEWLTDIWWDDNKYYNPSLKSRLTITKDTSKNQVVLTMTNMDPVDTATYYCARRVNYYYDPYYAMDYWGQGTLVTVSSTTTPAPRPPTPAPTIASQPLSLRPEACRPAAGGAVHTRGLDFACDIYIWAPLAGTCGVLLLSLVITLYCKRGRKKLLYIFKQPFMRPVQTTQEEDGCSCRFPEEEEGGCELRVKFSRSADAPAYKQGQNQLYNELNLGRREEYDVLDKRRGRDPEMGGKPRRKNPQEGLYNELQKDKMAEAYSEIGMKGERRRGKGHDGLYQGLSTATKDTYDALHMQALPPR

SEQ ID NO: 20 - DNA, 324 bp, Mus musculus
  misc_feature (1)..(324): SC16.3 VL
  CDS (1)..(324)
caaattgttctcacccagtctccagcaatcatgtctgtatctctaggggaacgggtcaccatgacctgcactgccagctcaagtgtaagttccagttacttgcactggtaccaacaaaagccaggatcctcccccaaactctggatttatagcacatccaacctggcttctggagtcccagctcgcttcagtggcagtgggtctgggacctcttattttttcacaatcagcagcatggaggctgaagatgctgccacttattactgccaccagtatcatcgttccccattcacgttcggcgcggggacaaagttgaaaataaga

SEQ ID NO: 21 - protein, 108 aa, Mus musculus
QIVLTQSPAIMSVSLGERVTMTCTASSSVSSSYLHWYQQKPGSSPKLWIYSTSNLASGVPARFSGSGSGTSYFFTISSMEAEDAATYYCHQYHRSPFTFGAGTKLKIR

SEQ ID NO: 22 - DNA, 369 bp, Mus musculus
  misc_feature (1)..(369): SC16.3 VH
  CDS (1)..(369)
caggttactctgaaagagtctggccctgggatattgcagccctcccagaccctcagtctgacttgttctttctctgggttttcactgagcacttctggtatgggtgtaggctggattcgtcagccatcagggaagggtctggagtggctggcacacatttggtgggatgatgtcaagcgctataacccagccctgaagagccgactaactatctccaaggatacctccagcagccaggtattcctcaagatcgccagtgtggacactgcagatactgccacatactactgtgctcgaatagctgactatggcggagattactatgctatggactactggggtcaaggaacctcagtcaccgtctcctca

SEQ ID NO: 23 - protein, 123 aa, Mus musculus
QVTLKESGPGILQPSQTLSLTCSFSGFSLSTSGMGVGWIRQPSGKGLEWLAHIWWDDVKRYNPALKSRLTISKDTSSSQVFLKIASVDTADTATYYCARIADYGGDYYAMDYWGQGTSVTVSS

SEQ ID NO: 24 - DNA, 321 bp, Mus musculus
  misc_feature (1)..(321): SC16.4 VL
  CDS (1)..(321)
gatatccagatgacacagactacatcttccctgtctgcctctctgggagacagagtcaccatcagttgcagggcaagtcaggacattagcaattatttaaactggtatcagcagaaaccagatggaactgttaaactcctgatctactacacatcaagattacactcaggcgtcccatcaaggttcagtggcagtgggtctggaacagattattctctcaccattagcaacctggagctagaagatattgccacttacttttgccaacagggtgatatgcttccgtggacgttcggtggaggcaccaagctggaaatcaaa

SEQ ID NO: 25 - protein, 107 aa, Mus musculus
DIQMTQTTSSLSASLGDRVTISCRASQDISNYLNWYQQKPDGTVKLLIYYTSRLHSGVPSRFSGSGSGTDYSLTISNLELEDIATYFCQQGDMLPWTFGGGTKLEIK

SEQ ID NO: 26 - DNA, 351 bp, Mus musculus
  misc_feature (1)..(351): SC16.4 VH
  CDS (1)..(351)
cagatccagttggtgcagtctggacctgagctgaagaagcctggagagacagtcaagatctcctgcaaggcttctggttataccttcacagactattcaatgcactgggtgaagcaggctccaggaaagggtttaaagtggatgggctggataaacactgagactggtgagccaggatatgcagatgacttcaagggacggtttgccttctctttggaaacctctgccagcactgcctatttgcagatcaacaacctcaaaaatgaggacacggctacatatttctgtgctcggtacgacgggtatgctatggactattggggtcaaggaacctcagtcaccgtctcctca

SEQ ID NO: 27 - protein, 117 aa, Mus musculus
QIQLVQSGPELKKPGETVKISCKASGYTFTDYSMHWVKQAPGKGLKWMGWINTETGEPGYADDFKGRFAFSLETSASTAYLQINNLKNEDTATYFCARYDGYAMDYWGQGTSVTVSS

SEQ ID NO: 28 - DNA, 318 bp, Mus musculus
  misc_feature (1)..(318): SC16.5 VL
  CDS (1)..(318)
caaattgttctcacccagtctccagcaatcatgtctgcatctccaggggagaaggtcaccatgacctgcagtgccagctcaagtgtaagttacatgcactggtaccagcagaagtcaggcacctcccccaaaagatggatttatgacacatccaaactggcttctggagtccctgctcgcttcagtggcagtgggtctgggacctcttactctctcacaatcagcagcatggaggctgaagatgctgccacttattactgccagcagtggactagaaacccgctcacgttcggggctggaaccaagctggagctgaaa

SEQ ID NO: 29 - protein, 106 aa, Mus musculus
QIVLTQSPAIMSASPGEKVTMTCSASSSVSYMHWYQQKSGTSPKRWIYDTSKLASGVPARFSGSGSGTSYSLTISSMEAEDAATYYCQQWTRNPLTFGAGTKLELK

SEQ ID NO: 30 - DNA, 372 bp, Mus musculus
  misc_feature (1)..(372): SC16.5 VH
  CDS (1)..(372)
caggttactctgaaagagtctggccctgggatattgcagccctcccagaccctcagtctgacttgttctttctctgggttttcactgagcacttctggtatgggtgtaggctggattcgtcagccttcaggagagggtctagagtggctggcagacatttggtgggatgacaataagtactataacccatccctgaagagccggctcacaatctccaaggatacctccagcaaccaggtattcctcaagatcaccagtgtggacactgcagatactgccacttactactgtgctcgaagagttaactatgtttacgacccgtactatgctatggactactggggtcaaggaacctcagtcaccgtctcctca

SEQ ID NO: 31 - protein, 124 aa, Mus musculus
QVTLKESGPGILQPSQTLSLTCSFSGFSLSTSGMGVGWIRQPSGEGLEWLADIWWDDNKYYNPSLKSRLTISKDTSSNQVFLKITSVDTADTATYYCARRVNYVYDPYYAMDYWGQGTSVTVSS

SEQ ID NO: 32 - DNA, 336 bp, Mus musculus
  misc_feature (1)..(336): SC16.7 VL
  CDS (1)..(336)
aacattatgatgacacagtcgccatcatctctggctgtgtctgcaggagaaaaggtcactatgagctgtaagtccagtcaaagtgttttatacagttcaaatcagaagaactacttggcctggtaccaacagaaaccagggcagtctcctaaactgctgatctactgggcatccactagggaatctggtgtccctgatcgcttcacaggcagtggatctgggacagattttactcttaccatcagcactgtacaagttgaagacctggcagtttattactgtcatcaatacctctcctcgtggacgttcggtggaggcaccaagctggaaatcaaa

SEQ ID NO: 33 - protein, 112 aa, Mus musculus
NIMMTQSPSSLAVSAGEKVTMSCKSSQSVLYSSNQKNYLAWYQQKPGQSPKLLIYWASTRESGVPDRFTGSGSGTDFTLTISTVQVEDLAVYYCHQYLSSWTFGGGTKLEIK

SEQ ID NO: 34 - DNA, 357 bp, Mus musculus
  misc_feature (1)..(357): SC16.7 VH
  CDS (1)..(357)
gaggtccagctgcaacagtctggacctgagctggtgaagcctggggcttcagtgaagatttcctgcaaggcttctggttactcattcactggctataaaatgcactgggtgaagcaaagccatgtaaagagccttgagtggattggacgtattaatccttacaatggtgctactagctacaaccagaatttcaaggacaaggccaccttgactgtagataagtcctccagcacagcctacatggacctccacagcctgacatctgaggactctgcagtctatttctgtgcaagaggggactataggtacgactggtttgcttactggggccaagggactctggtcactgtctctgca

SEQ ID NO: 35 - protein, 119 aa, Mus musculus
EVQLQQSGPELVKPGASVKISCKASGYSFTGYKMHWVKQSHVKSLEWIGRINPYNGATSYNQNFKDKATLTVDKSSSTAYMDLHSLTSEDSAVYFCARGDYRYDWFAYWGQGTLVTVSA

SEQ ID NO: 36 - DNA, 321 bp, Mus musculus
  misc_feature (1)..(321): SC16.8 VL
  CDS (1)..(321)
gaaatccagatgacccagtctccatcctctatgtctgcatctctgggagacagaataaccatcacttgccaggcaactcaagacattgttaagaatttaaactggtatcagcagaaaccagggaaacccccttcattcctgatctattatgcaattgaactggcagaaggggtcccatcaaggttcagtggcagtgggtctgggtcagactattctctgacaatcagcaacctggagtctgaagattttgcagactattactgtctacagttttatgagtttccgttcacgttcggtgctgggaccaagctggagctgaaa

SEQ ID NO: 37 - protein, 107 aa, Mus musculus
EIQMTQSPSSMSASLGDRITITCQATQDIVKNLNWYQQKPGKPPSFLIYYAIELAEGVPSRFSGSGSGSDYSLTISNLESEDFADYYCLQFYEFPFTFGAGTKLELK

SEQ ID NO: 38 - DNA, 363 bp, Mus musculus
  misc_feature (1)..(363): SC16.8 VH
  CDS (1)..(363)
caggcccagctgcagcagtctggagctgagctggtaaggcctgggacttcagtgaaggtgtcctgcaaggcttctggatacgccttcactaattacttgatagagtgggtaaagcagaggcctggacagggccttgagtggattggagtgattaatcctggaactggtggtactaactacaatgagaacttcaagggcaaggcaactctgactgcagacaaatcctccagtactgcctacatgcagctcagcagcctgacatctgatgactctgcggtctatttctgtgcaagatccccctatgattaccacgagggtgctatggactactggggtcaaggaacctcagtcaccgtctcctca

SEQ ID NO: 39 - protein, 121 aa, Mus musculus
QAQLQQSGAELVRPGTSVKVSCKASGYAFTNYLIEWVKQRPGQGLEWIGVINPGTGGTNYNENFKGKATLTADKSSSTAYMQLSSLTSDDSAVYFCARSPYDYHEGAMDYWGQGTSVTVSS

SEQ ID NO: 40 - DNA, 324 bp, Mus musculus
  misc_feature (1)..(324): SC16.10 VL
  CDS (1)..(324)
caaattgttctcacccagtctccagcaatcatgtctgcatctctaggggaacgggtcaccatgacctgcactgccagctcaagtgtaagttccagttacttgcactggtaccagcagaagccaggatcatcccccaaactctggatttatagcacttccaacctggcttctggagtcccaactcgcttcagtggcagtgggtctgggacctcttactctctcacaatcagcagcatggaggctgaagatgctgccacttattactgccaccagtatcatcgttccccattcacgttcggctcggggacaaagttggaaataaaa

SEQ ID NO: 41 - protein, 108 aa, Mus musculus
QIVLTQSPAIMSASLGERVTMTCTASSSVSSSYLHWYQQKPGSSPKLWIYSTSNLASGVPTRFSGSGSGTSYSLTISSMEAEDAATYYCHQYHRSPFTFGSGTKLEIK

SEQ ID NO: 42 - DNA, 360 bp, Mus musculus
  misc_feature (1)..(360): SC16.10 VH
  CDS (1)..(360)
caggttactctgaaagagtctggccctgggatattgcagtcctcccagaccctcagtctgacttgttctttctctgggttttcactgagcacttctggtatgggtgtaggctggattcgtcagccatcagggaagggtctggagtggctggcacacatttggtgggatgatgtcaagcgctataacccagtcctgaagagccgactgactatctccaaggatacctccagcagccaggtattcctcaagatcgccagtgtggacactgcagatactgccacatactattgtgctcgattagttgatgatctgtactactttgactactggggccaaggcaccactctcacagtctcctca

SEQ ID NO: 43 - protein, 120 aa, Mus musculus
QVTLKESGPGILQSSQTLSLTCSFSGFSLSTSGMGVGWIRQPSGKGLEWLAHIWWDDVKRYNPVLKSRLTISKDTSSSQVFLKIASVDTADTATYYCARLVDDLYYFDYWGQGTTLTVSS

SEQ ID NO: 44 - DNA, 336 bp, Mus musculus
  misc_feature (1)..(336): SC16.11 VL
  CDS (1)..(336)
gatgttgagatgacccagactccactcactttgtcggttaccattggacaaccagcctccatctcttgcaagtcaagtcagagcctctcagacagtgatggaaagacatatttgaattggatgtttcagaggccaggccggtctccaaagcgcctaatctatctggtgtctaaactggactctggagtccctgacaggttcactggcagtggatcagggacagatttcacactgaaaatcagcagagtggaggctgaggatttgggagtttactattgctggcaaggtaaacattttccgtggacgttcggtggaggcaccaagctggaaatcaaa

SEQ ID NO: 45 - protein, 112 aa, Mus musculus
DVEMTQTPLTLSVTIGQPASISCKSSQSLSDSDGKTYLNWMFQRPGRSPKRLIYLVSKLDSGVPDRFTGSGSGTDFTLKISRVEAEDLGVYYCWQGKHFPWTFGGGTKLEIK

SEQ ID NO: 46 - DNA, 351 bp, Mus musculus
  misc_feature (1)..(351): SC16.11 VH
  CDS (1)..(351)
cagatccagttggtgcagtctggacctgagctgaagaagcctggagagacagtcaagatctcctgcaaggcttctggttataccttcacagactattcaatgcactgggtgaagcaggctccaggaaagggtttaaagtggatgggctggataaacactgagactgttgagccaacatatgcagatgacttcatgggacggtttgccttctctttggaaacctctgccagcactgcctttttgcagatcaacaacctcgaaaatgaggacacggctacatatttctgtgctagatttggttcctatgctatggactactggggtcaaggaacctcagtcaccgtctcctca

SEQ ID NO: 47 - protein, 117 aa, Mus musculus
QIQLVQSGPELKKPGETVKISCKASGYTFTDYSMHWVKQAPGKGLKWMGWINTETVEPTYADDFMGRFAFSLETSASTAFLQINNLENEDTATYFCARFGSYAMDYWGQGTSVTVSS

SEQ ID NO: 48 - DNA, 318 bp, Mus musculus
  misc_feature (1)..(318): SC16.13 VL
  CDS (1)..(318)
caaattgttctcacccagtctccagcactcgtgtctgcatctccaggggagaaggtcaccatgacctgcagtgccagctcaagtgtaagttacatgtactggtaccagcagaaaccaagatcctcccccaaaccctggatttatctcacatccaacctggcttctggagtccctgctcgcttcagtggcagtgggtctgggacctcttactctctcacaatcagcagcatggaggctgaagatgctgccacttattactgccagcagtggcgtagtaacccattcacgttcggctcggggacaaagttggaaataaaa

SEQ ID NO: 49 - protein, 106 aa, Mus musculus
QIVLTQSPALVSASPGEKVTMTCSASSSVSYMYWYQQKPRSSPKPWIYLTSNLASGVPARFSGSGSGTSYSLTISSMEAEDAATYYCQQWRSNPFTFGSGTKLEIK

SEQ ID NO: 50 - DNA, 372 bp, Mus musculus
  misc_feature (1)..(372): SC16.13 VH
  CDS (1)..(372)
caggttactctgaaagagtctggccctgggatattgcagccctcccagaccctcagtctgacttgttctttctctgggttttcactgagcacttctggtatgggtgtaggctggattcggcagccatcagggaagggtctggagtggctggcacacatttggtgggatgatgtcaagcgctataacccagccctgaagagccgactgactatctccaaggatacctccagcagccaggtattcctcaagatcgccagtgtggacactgcagatactgccacatactactgtgctcgcatagtttcctttgataacgacgttgtctctgctatggactactggggtcaaggaacctcagtcaccgtctcctcn

SEQ ID NO: 51 - protein, 124 aa, Mus musculus
  misc_feature (124)..(124): The 'Xaa' at location 124 stands for Ser.
QVTLKESGPGILQPSQTLSLTCSFSGFSLSTSGMGVGWIRQPSGKGLEWLAHIWWDDVKRYNPALKSRLTISKDTSSSQVFLKIASVDTADTATYYCARIVSFDNDVVSAMDYWGQGTSVTVSX

SEQ ID NO: 52 - DNA, 321 bp, Mus musculus
  misc_feature (1)..(321): SC16.15 VL
  CDS (1)..(321)
gacatccagatgactcagtctccagcctccctggctgcatctgtgggagaaactgtcgccatcacatgtcgagcaagtgagaacatttactacaatttagcatggtatcagcagaaacaagggaaatctcctcagctcctgatctatactgcaaacagtttggaagatggtgtcccatcgaggttcagtggcagtggatctgggacacagtattctttgaagatcaacagcatgcagcctgaagattccgcaacttatttctgtaaacaggcttatgacgttcctccgacgttcggtggaggcaccaagctggaaatcaaa

SEQ ID NO: 53 - protein, 107 aa, Mus musculus
DIQMTQSPASLAASVGETVAITCRASENIYYNLAWYQQKQGKSPQLLIYTANSLEDGVPSRFSGSGSGTQYSLKINSMQPEDSATYFCKQAYDVPPTFGGGTKLEIK

SEQ ID NO: 54 - DNA, 351 bp, Mus musculus
  misc_feature (1)..(351): SC16.15 VH
  CDS (1)..(351)
caggtccagcttcagcagtctggggctgaactggcaaaacctggggcctcagtgaagatgtcctgtaaggcttctggctacacctttactcgctactggatacactggataaaacagaggcctggacagggtctggaatggattggatacattaatcctacaactgtttatactgagttcaatcagaacttcaaggacaaggccactttgactgcagacaaatcctccaccacagcctccatgcaactgagcagcctgacatctgaggactctgcagtctattactgtgcaagaggcggtagtaacttctttgactactggggccaaggcaccactctcacagtctcctca

SEQ ID NO: 55 - protein, 117 aa, Mus musculus
QVQLQQSGAELAKPGASVKMSCKASGYTFTRYWIHWIKQRPGQGLEWIGYINPTTVYTEFNQNFKDKATLTADKSSTTASMQLSSLTSEDSAVYYCARGGSNFFDYWGQGTTLTVSS

SEQ ID NO: 56 - DNA, 321 bp, Mus musculus
  misc_feature (1)..(321): SC16.18 VL
  CDS (1)..(321)
gatatccagatgacacagactacatcctccctgtctgcctctttgggagacagagtcaccatcagttgcagggcaagtcagaatattatcaattatttaaactggtatcagcagaagccagatggaactgttaaactcctgatctactacacatcaagattacactcaggagtcccatcaaggttcagtggcagtgggtctgggacagattattctctcaccatcagcaacctggaacctgaagatattgccacttactattgtcaacagtatagtgagcgtccgtacacgttcgggggggggaccaagctggaaataaaa

SEQ ID NO: 57 - protein, 107 aa, Mus musculus
DIQMTQTTSSLSASLGDRVTISCRASQNIINYLNWYQQKPDGTVKLLIYYTSRLHSGVPSRFSGSGSGTDYSLTISNLEPEDIATYYCQQYSERPYTFGGGTKLEIK

SEQ ID NO: 58 - DNA, 351 bp, Mus musculus
  misc_feature (1)..(351): SC16.18 VH
  CDS (1)..(351)
gaagtgaagctggaggagtcaggaggaggcttggtacaacctggagaatccatgaaactctcttgtgctgcttctggattcacttttagtgatgcctggatggactgggtccgccagtctccagagaagggacttgagtgggttgctgaaattagaaacaaagctaataatcatgcaacatattatgctgagtctgtgaaagggaaattcaccatctcaagagatgattccaaaagtagagtgtacctgcaaatgaacaacttaagagctgcagacactggcatttattactgtacggcctatagtaactttgcttactggggccaagggactctggtcactgtctctaca

SEQ ID NO: 59 - protein, 117 aa, Mus musculus
EVKLEESGGGLVQPGESMKLSCAASGFTFSDAWMDWVRQSPEKGLEWVAEIRNKANNHATYYAESVKGKFTISRDDSKSRVYLQMNNLRAADTGIYYCTAYSNFAYWGQGTLVTVST

SEQ ID NO: 60 - DNA, 318 bp, Mus musculus
  misc_feature (1)..(318): SC16.19 VL
  CDS (1)..(318)
gacatccagatgacacagtctccatcctcactgtctgcatctctgggaggcaaagtcaccttcacttgcaaggcaagccaagacattcacaagtatgtagcttggtaccaacacaagcctggaaaaggtcctaggctgctcatacattacacatctacattacagccaggcatctcatcaaggttcagtggaagtgggtctgggagagattattccttcagcatcagcaacctggagcctgaagatattgcaacttattattgtctacagtataataatctgtacacgttcggaggggggaccaagctggaaataaaa

SEQ ID NO: 61 - protein, 106 aa, Mus musculus
DIQMTQSPSSLSASLGGKVTFTCKASQDIHKYVAWYQHKPGKGPRLLIHYTSTLQPGISSRFSGSGSGRDYSFSISNLEPEDIATYYCLQYNNLYTFGGGTKLEIK

SEQ ID NO: 62 - DNA, 354 bp, Mus musculus
  misc_feature (1)..(354): SC16.19 VH
  CDS (1)..(354)
gaggttcagctgcagcagtctggggctgagcttgtgaggccaggggcctcagtcaagttgtcctgcacagcttctggcttcaacattaaagacagccttttgcactgggtgaagcagaggcctgaaaagggcctggagtggattgggtggattgatcctgaggatggtgaaactaaatatgccccgaacttccaggacaaggccactataactacagactcatcctccaacacagcctacctgcaactcatcagcctgacatctgttgacactgccatctattactgtgcctatggtaactacgtgcggcactttgactactggggccaaggcaccactctcacagtctcctca

SEQ ID NO: 63 - protein, 118 aa, Mus musculus
EVQLQQSGAELVRPGASVKLSCTASGFNIKDSLLHWVKQRPEKGLEWIGWIDPEDGETKYAPNFQDKATITTDSSSNTAYLQLISLTSVDTAIYYCAYGNYVRHFDYWGQGTTLTVSS

SEQ ID NO: 64 - DNA, 321 bp, Mus musculus
  misc_feature (1)..(321): SC16.20 VL
  CDS (1)..(321)
gaaatccagatgacccagtctccatcctctatgtctgcatctctgggagacagaataaccatcacttgccaggcaactcaagacattgttaagaatttaaactggtatcagcagaaaccagggaaacccccttcattcctgatctattatgcaactgaactggcagaaggggtcccatcaaggttcagtggcagtgggtctgggtcagactattctctgacaatcaggaacctggagtctgaagactttgcagaccattactgtctacagttttatgagtttccgttcacgttcggtgctgggaccaagctggagctgaaa

SEQ ID NO: 65 - protein, 107 aa, Mus musculus
EIQMTQSPSSMSASLGDRITITCQATQDIVKNLNWYQQKPGKPPSFLIYYATELAEGVPSRFSGSGSGSDYSLTIRNLESEDFADHYCLQFYEFPFTFGAGTKLELK

SEQ ID NO: 66 - DNA, 363 bp, Mus musculus
  misc_feature (1)..(363): SC16.20 VH
  CDS (1)..(363)
caggtccagttgcagcagtctggaactgagctggtaaggcctgggacttcagtgagggtgtcctgcaaggcttctggatacgccttcggtaatcacttgattgagtgggtgaagcagaggcctggacagggccttgagtggattggagtgattaatcctggaactggtggtactcactacaatgagaagttcaaggacaaggcaagactgaccgcagacaaatcctccaacactgcctacatgcacctcaacagcctgacatctgatgactctgcggtctatttctgtgcaagatccccctatgattaccacgagggtgctatggactactggggtcaaggaacctcagtcaccgtctcctca

SEQ ID NO: 67 - protein, 121 aa, Mus musculus
QVQLQQSGTELVRPGTSVRVSCKASGYAFGNHLIEWVKQRPGQGLEWIGVINPGTGGTHYNEKFKDKARLTADKSSNTAYMHLNSLTSDDSAVYFCARSPYDYHEGAMDYWGQGTSVTVSS

SEQ ID NO: 68 - DNA, 339 bp, Mus musculus
  misc_feature (1)..(339): SC16.21 VL
  CDS (1)..(339)
gacattgtgatgacacagtctccatcctccctggctatgtcagtaggacagaaggtcactatgagctgcaagtccagtcagagccttttaaatagtagcaatcaaaagaattatttggcctggtatcagcaggaaccaggacagtctcctaaacttctggtatcctttgcatccactagggaatctggggtccctgatcgcttcacaggcagtggatctgggacagatttcactcttaccatcagcggtgtgcaggctgaagacctggcagtttattactgtcagcaacattatagcattccgctcacgttcggtgctgggaccaagctggagctgaaa

SEQ ID NO: 69 - protein, 113 aa, Mus musculus
DIVMTQSPSSLAMSVGQKVTMSCKSSQSLLNSSNQKNYLAWYQQEPGQSPKLLVSFASTRESGVPDRFTGSGSGTDFTLTISGVQAEDLAVYYCQQHYSIPLTFGAGTKLELK

SEQ ID NO: 70 - DNA, 372 bp, Mus musculus
  misc_feature (1)..(372): SC16.21 VH
  CDS (1)..(372)
caggttcagctacaacagtctggacctgagctggtgaagcctggggcctcagtgaagatttcctgcaaggcttctggctatgcattcagtagctcctggatgaactgggtgaagcagaggcctggaaagggtcttgagtggattggacggatttatcctggagatggagatactaactacaatgggaagttcaagggcaaggccacactgactgcagacaaatcctccagcacagcctacatgcaactcagcagcctgacatctgaggactctgcggtctacttctgtgcaatgggtatttataactacgatggtagccgttactattctatggactactggggtcaaggaacctcagtcaccgtctcctca

SEQ ID NO: 71 - protein, 124 aa, Mus musculus
QVQLQQSGPELVKPGASVKISCKASGYAFSSSWMNWVKQRPGKGLEWIGRIYPGDGDTNYNGKFKGKATLTADKSSSTAYMQLSSLTSEDSAVYFCAMGIYNYDGSRYYSMDYWGQGTSVTVSS

SEQ ID NO: 72 - DNA, 321 bp, Mus musculus
  misc_feature (1)..(321): SC16.22 VL
  CDS (1)..(321)
gatatccagatgacacagactacatcctccctgtctgcctctctgggagacagagtcaccatcagttgcagggcaagtcaggacattaagaattatttaaactggtatcagcagaaaccagatggaactgttaaacccctgatctactacacatcaagagtacactcaggagtcccatcaaggttcagtggcagtgggtctggaacagattattctctcaccattagcaacctggagcaagaagatattgccacttacttttgccagcagggttatacgcttccattcacgttcggctcggggacaaagttggaaathaar

SEQ ID NO: 73 - protein, 107 aa, Mus musculus
DIQMTQTTSSLSASLGDRVTISCRASQDIKNYLNWYQQKPDGTVKPLIYYTSRVHSGVPSRFSGSGSGTDYSLTISNLEQEDIATYFCQQGYTLPFTFGSGTKLEIK

SEQ ID NO: 74 - DNA, 360 bp, Mus musculus
  misc_feature (1)..(360): SC16.22 VH
  CDS (1)..(360)
caggtccagctgcagcagcctggggctgaactggtgaagcctggggcttcagtgaagctgtcctgtaaggcttctggatacaccttcactacctactggatgcactgggtgaagcagaggcctggacaaggccttgagtggatcggagagattgatccttctgatagttatacttactacaatcaaaagttcaagggcaaggccacattgactgtagacaaatcctccagcacagcctacatgcaactcagcagcctgacatctgaggactctgcggtctattattgtgcaagaggggactatggtaacccctatgctatggactactggggtcaaggatcctcagtcaccgtctcctca

SEQ ID NO: 75 - protein, 120 aa, Mus musculus
QVQLQQPGAELVKPGASVKLSCKASGYTFTTYWMHWVKQRPGQGLEWIGEIDPSDSYTYYNQKFKGKATLTVDKSSSTAYMQLSSLTSEDSAVYYCARGDYGNPYAMDYWGQGSSVTVSS

SEQ ID NO: 76 - DNA, 324 bp, Mus musculus
  misc_feature (1)..(324): SC16.23 VL
  CDS (1)..(324)
caaattgttctcacccagtctccagcaatcatgtctgcatctcctggggagaaggtcaccttgacctgcagtgccagctcaagtgtaagttccaggtacttgtactggtaccagcagaagccaggatcctcccccaaactctggatttatagcacatccaacctggcttctggagtccctgctcgcttcagtggcagtgggtctgggacctcttactctctcataatcagcagcatggaggctgaagatgctgcctcttatttctgccatcagtggagtaattacccactcacgttcggtgctgggaccaagctggagctgaaa

SEQ ID NO: 77 - protein, 108 aa, Mus musculus
QIVLTQSPAIMSASPGEKVTLTCSASSSVSSRYLYWYQQKPGSSPKLWIYSTSNLASGVPARFSGSGSGTSYSLIISSMEAEDAASYFCHQWSNYPLTFGAGTKLELK

SEQ ID NO: 78 - DNA, 372 bp, Mus musculus
  misc_feature (1)..(372): SC16.23 VH
  CDS (1)..(372)
caggttactctgaaagagtctggccctgggatattgcagccctcccagaccctcagtctgacttgttctttctctgggttttcactgagcacttctaatacgggcataggctggattcgtcagccttcagggacgggtctggagtggctggcacacatttggtggaatgatgataagtactataatccatccctgaagagccggctcacaatctccaaggaaacctccaacaaccaggtattcctcaagatcaccaatgtggacactgcagatactgcctcatacttctgtgttcaaatcgggcgcgactacagtaactacgcctggtatttcgatgtctggggcgcagggaccacggtcaccgtctcctca

SEQ ID NO: 79 - protein, 124 aa, Mus musculus
QVTLKESGPGILQPSQTLSLTCSFSGFSLSTSNTGIGWIRQPSGTGLEWLAHIWWNDDKYYNPSLKSRLTISKETSNNQVFLKITNVDTADTASYFCVQIGRDYSNYAWYFDVWGAGTTVTVSS

SEQ ID NO: 80 - DNA, 318 bp, Mus musculus
  misc_feature (1)..(318): SC16.25 VL
  CDS (1)..(318)
caaattgttctcacccagtctccagcaatcatgtctgcatctccaggggagaaggtcaccatgacctgcagtgccagctcaagtgtaagttacatgcactggtaccagcagaagtcaggcacctcccccaaaagatggatttatgactcatccaaactggcttctggagtccctgctcgcttcagtggcagtgggtctgggacctcttactctctcacaatcagcagcatggaggctgaagatgctgccacttattactgccagcagtggagtagtaacccgctcacgttcggtgctgggaccaagctggagctgaaa

SEQ ID NO: 81 - protein, 106 aa, Mus musculus
QIVLTQSPAIMSASPGEKVTMTCSASSSVSYMHWYQQKSGTSPKRWIYDSSKLASGVPARFSGSGSGTSYSLTISSMEAEDAATYYCQQWSSNPLTFGAGTKLELK

SEQ ID NO: 82 - DNA, 372 bp, Mus musculus
  misc_feature (1)..(372): SC16.25 VH
  CDS (1)..(372)
caggttactctgaaagagtctggccctgggatattgcagccctcccagaccctcagtctgacttgttctttctctgggttttcactgagcacttctggtatgggtgtaggctggattcgtcagccttcaggagagggtctagagtggctgacagacatttggtgggatgacaataagtactataacccatccctgaagagccggctcacaatctccaaggatacctccagcaaccaggtattcctcaatatcaccagtgtggacactgcagatactgccacttactactgtgctcgaagagttaactattattacgacccgtactatgctatggactactggggtcaaggaacctcagtcaccgtctcctca

SEQ ID NO: 83 - protein, 124 aa, Mus musculus
QVTLKESGPGILQPSQTLSLTCSFSGFSLSTSGMGVGWIRQPSGEGLEWLTDIWWDDNKYYNPSLKSRLTISKDTSSNQVFLNITSVDTADTATYYCARRVNYYYDPYYAMDYWGQGTSVTVSS

SEQ ID NO: 84 - DNA, 336 bp, Mus musculus; identical to SEQ ID NO: 44
  misc_feature (1)..(336): SC16.26 VL
  CDS (1)..(336)

SEQ ID NO: 85 - protein, 112 aa, Mus musculus; identical to SEQ ID NO: 45

SEQ ID NO: 86 - DNA, 351 bp, Mus musculus
  misc_feature (1)..(351): SC16.26 VH
  CDS (1)..(351)
cagatccagttggtgcagtctggacctgagctgaagaagcctggagagacagtcaagatctcctgcaaggcttctggttattccttcacagactattcaatgcactgggtgaagcaggctccaggaaagggtttaaagtggatgggctggataaacactgagactgttgagccaacatatgcagatgacttcatgggacggtttgccttctctttggaaacctctgccagcactgcctttttgcagatcaacaacctcgaaaatgaggacacggctacatatttctgtgctagatttggttcctatgctatggactactggggtcaaggaacctcagtnacvgtntcntcn

SEQ ID NO: 87 - protein, 117 aa, Mus musculus
  misc_feature (114)..(114): The 'Xaa' at location 114 stands for Thr.
  misc_feature (116)..(116): The 'Xaa' at location 116 stands for Ser.
  misc_feature (117)..(117): The 'Xaa' at location 117 stands for Ser.
QIQLVQSGPELKKPGETVKISCKASGYSFTDYSMHWVKQAPGKGLKWMGWINTETVEPTYADDFMGRFAFSLETSASTAFLQINNLENEDTATYFCARFGSYAMDYWGQGTSVXVXX

SEQ ID NO: 88 - DNA, 318 bp, Mus musculus
  misc_feature (1)..(318): SC16.29 VL
  CDS (1)..(318)
caaattgttctcacccagtctccagcaatcatgtctgcatctccaggggagaaggtcaccataacctgcagtgccagctcaagtgtaagttacatgcactggttccagcagaagccaggcacttctcccaaactctggatttataccacatccaacctggcttctggagtccctgctcgcttcagtggcagtggatctgggacctcttactctctcacagtcagccgaatggaggctgaagatgctgccacttattactgccagcaaaggagtctttatccgtacacgttcggaggggggaccaaggtggaaataaaa

SEQ ID NO: 89 - protein, 106 aa, Mus musculus
QIVLTQSPAIMSASPGEKVTITCSASSSVSYMHWFQQKPGTSPKLWIYTTSNLASGVPARFSGSGSGTSYSLTVSRMEAEDAATYYCQQRSLYPYTFGGGTKVEIK

SEQ ID NO: 90 - DNA, 363 bp, Mus musculus
  misc_feature (1)..(363): SC16.29 VH
  CDS (1)..(363)
caggttcagctacagcagtctggagctgagctggcgaggcccggggcttcagtgaagctgtcctgcaaggcttcaggctacaccttcactgaccagtatataaactgggtgaagcagaggactggacagggccttgagtggattggagagatttatcccggaaggggtaatacttactacaatgagaagttcaagggcaaggccacactgactgcagacaaatcctccagcacagcctacatgcaactcagcagcctgacatctgaggactctgcagtctatttctgtgcaagagaggatggtggttacgacgatgcctggtttgcttactggggccaagggactctggtcactgtctctgca

SEQ ID NO: 91 - protein, 121 aa, Mus musculus
QVQLQQSGAELARPGASVKLSCKASGYTFTDQYINWVKQRTGQGLEWIGEIYPGRGNTYYNEKFKGKATLTADKSSSTAYMQLSSLTSEDSAVYFCAREDGGYDDAWFAYWGQGTLVTVSA

SEQ ID NO: 92 - DNA, 324 bp, Mus musculus
  misc_feature (1)..(324): SC16.30 VL
  CDS (1)..(324)
caaattgttctgacccagtctccaacaatcatgtctgcatctctaggggaacgggtcaccatgacctgcactgccagctcaagtgtaacttccagttacttgcactggtaccagcagaagccaggatcctcccccaaactctggatttatagcacatccaacctggcttctggagtcccagctcgcttcagtggcagtgggtctgggacctcttactctctcacaatcagcagcatggaggctgaagatgctgccacttattactgccaccagtttcatcgttccccattcacgttcggctcggggacaaagttggaaataaaa

SEQ ID NO: 93 - protein, 108 aa, Mus musculus
QIVLTQSPTIMSASLGERVTMTCTASSSVTSSYLHWYQQKPGSSPKLWIYSTSNLASGVPARFSGSGSGTSYSLTISSMEAEDAATYYCHQFHRSPFTFGSGTKLEIK

SEQ ID NO: 94 - DNA, 360 bp, Mus musculus
  misc_feature (1)..(360): SC16.30 VH
  CDS (1)..(360)
caggttactctgaaagagtctggccctgggatattgcagccctcccagaccctcagtctgacttgttctttctctgggttttcactgagcacttctggtatgggtgtaggctggattcgtcagccatcagggaagggtctggagtggctggcacacatttggtgggatgatgtcaagcgctataaaccagccctgaagagccgactgactgtctccaaggatacctccagcaaccaggttttcctcaagatcgccactgtggacgctgcagatactggcacatactactgtgctcgaatcgttgatggtcaccccccgtttgcttactggggccaagggactctggtcactgtctctgca

SEQ ID NO: 95 - protein, 120 aa, Mus musculus
QVTLKESGPGILQPSQTLSLTCSFSGFSLSTSGMGVGWIRQPSGKGLEWLAHIWWDDVKRYKPALKSRLTVSKDTSSNQVFLKIATVDAADTGTYYCARIVDGHPPFAYWGQGTLVTVSA

SEQ ID NO: 96 - DNA, 336 bp, Mus musculus
  misc_feature (1)..(336): SC16.30 VL
  CDS (1)..(336)
gacattgtgctgacccagtctccactctctctgcctgtcaatattggagatcaagcctctatctcttgcaagtctactaagagtcttctgaatagtgatggattcacttatttggactggtatttgcagaggccaggccagtctccacaattcctaatatatttggtttctaatcgattttctggagttccagacaggttcagtggcagtgggtcaggaacagatttcacactcaagatcagcagagtggaggctgaggatttgggagtatattattgcttccagagtaactatcttccgctcacgttcggtgctgggaccaagctggagctgaga

SEQ ID NO: 97 - protein, 112 aa, Mus musculus
DIVLTQSPLSLPVNIGDQASISCKSTKSLLNSDGFTYLDWYLQRPGQSPQFLIYLVSNRFSGVPDRFSGSGSGTDFTLKISRVEAEDLGVYYCFQSNYLPLTFGAGTKLELR

SEQ ID NO: 98 - DNA, 357 bp, Mus musculus
  misc_feature (1)..(357): SC16.31 VH
  CDS (1)..(357)
gaggtccaactgcagcagtctggacctgagctggtgaagcctggggcttcagtgaagatatcctgcaaggcttctggttactcattcagtcgtttctatatgcactgggtgaagcaaagtcctgaaaatagtcttgagtggattggagagattaatcctagcactgggggtacaagctacaaccagaagttcaagggcaaggccacattaactgtagataaatcctccagcacagcctacatgcagctcaagagcctgacatctgaagagtctgcagtctattactgtactaggggttacgggagcaactggtacttcgatgtctggggcgcagggaccacggtcaccgtctccaca

SEQ ID NO: 99 - protein, 119 aa, Mus musculus
EVQLQQSGPELVKPGASVKISCKASGYSFSRFYMHWVKQSPENSLEWIGEINPSTGGTSYNQKFKGKATLTVDKSSSTAYMQLKSLTSEESAVYYCTRGYGSNWYFDVWGAGTTVTVST

SEQ ID NO: 100 - DNA, 321 bp, Mus musculus
  misc_feature (1)..(321): SC16.34 VL
  CDS (1)..(321)
agtattgtgatgacccagactcccaaattcctgcttgtatcagcaggagacagggttaccataacctgcaaggccagtcagagtgtgagtaatgatgtagcttggtaccaacagaagccagggcagtctcctaaactgctgatatactatgcatccaatcgctacagtggagtccctgatcgcttcactggcagtggatatgggacggatttcactttcaccatcagcactgtgcaggctgaagacctggcagtttatttctgtcagcaggattatagctctccgtggacgttcggtggaggcaccaagctggaaatcaaa

SEQ ID NO: 101 - protein, 107 aa, Mus musculus
SIVMTQTPKFLLVSAGDRVTITCKASQSVSNDVAWYQQKPGQSPKLLIYYASNRYSGVPDRFTGSGYGTDFTFTISTVQAEDLAVYFCQQDYSSPWTFGGGTKLEIK

SEQ ID NO: 102 - DNA, 354 bp, Mus musculus
  misc_feature (1)..(354): SC16.34 VH
  CDS (1)..(354)
cagatccagttggtgcagtctggacctgagctgaagaggcctggagagacagtcaagatctcctgcaaggcttctggatataccttcacaaactatggaatgaactgggtgaagcaggctccaggaaagggtttaaagtggatgggctggataaacacgtacactggagacccaacatatgctgatgacttcaagggacggtttgccttctctttggaaacctctgccagcactgcctatttgcagatcaacaacctcaaaaatgaggacacggctacatatttctgtgcaagaattggcggtaatagtccctctgattactggggccaaggcacctctctcacagtctcctca

SEQ ID NO: 103 - protein, 118 aa, Mus musculus
QIQLVQSGPELKRPGETVKISCKASGYTFTNYGMNWVKQAPGKGLKWMGWINTYTGDPTYADDFKGRFAFSLETSASTAYLQINNLKNEDTATYFCARIGGNSPSDYWGQGTSLTVSS

SEQ ID NO: 104 - DNA, 321 bp, Mus musculus
  misc_feature (1)..(321): SC16.35 VL
  CDS (1)..(321)
gatatccagatgacacagactacatcctccctgtctgcctctctgggagacagagtcaccatcagttgcagggcaagtcaggacattagcaattatttaaactggtatcagcagaaaccagatggaactgttaaactcctgatctactacacatcaagattacactcaggagtcccatcaaggttcagtggcagtgggtctggaacagattattctctcaccattagcaacctggagcaagaagatattgccacttacttttgccaacagggtaatacgcttccgtacacgttcggaggggggaccaagctggaaataaaa

SEQ ID NO: 105 - protein, 107 aa, Mus musculus
DIQMTQTTSSLSASLGDRVTISCRASQDISNYLNWYQQKPDGTVKLLIYYTSRLHSGVPSRFSGSGSGTDYSLTISNLEQEDIATYFCQQGNTLPYTFGGGTKLEIK

SEQ ID NO: 106 - DNA, 360 bp, Mus musculus
  misc_feature (1)..(360): SC16.35 VH
  CDS (1)..(360)
gatgtgcagcttcaggagtcgggacctggcctggtgaaaccttctcagtctctgtccctcacctgcactgtcactggctactcaatcaccagtgattatgcctggaactggatccggcagtttccaggaaacaaactggagtggatgggctacataagctacagtggtagcactagctacaacccatctctcaaaagtcgaatctctatcactcgagacacatccaagaaccagttcttcctgcagttgaattctgtgactactgaggacacagccacatattactgtgcaagattttactacggtagtagctatgctatggactactggggtcaaggaacctcagtcaccgtctcctca

SEQ ID NO: 107 - protein, 120 aa, Mus musculus
DVQLQESGPGLVKPSQSLSLTCTVTGYSITSDYAWNWIRQFPGNKLEWMGYISYSGSTSYNPSLKSRISITRDTSKNQFFLQLNSVTTEDTATYYCARFYYGSSYAMDYWGQGTSVTVSS

SEQ ID NO: 108 - DNA, 321 bp, Mus musculus
  misc_feature (1)..(321): SC16.36 VL
  CDS (1)..(321)
gaaacaactgtgacccagtctccagcatccctgtccgtgactacaggagaaaaagtcactatcagatgcataaccacccctgatattgatgatgatatgaactggtaccagcagaagccaggggaacctcctaacctccttatttcagaaggcaatagtcttcgtcctggagtcccatcccgattctccagcagtggctatggcacaaattttgtttttacaattgaaaacacgctctcagaagatgttgcagattactactgtttgcaaagtgataacatgccattcacgttcggctcggggacaaagttggaaataaar

SEQ ID NO: 109 - protein, 107 aa, Mus musculus
ETTVTQSPASLSVTTGEKVTIRCITTPDIDDDMNWYQQKPGEPPNLLISEGNSLRPGVPSRFSSSGYGTNFVFTIENTLSEDVADYYCLQSDNMPFTFGSGTKLEIK

SEQ ID NO: 110 - DNA, 354 bp, Mus musculus
  misc_feature (1)..(354): SC16.35 VH
  CDS (1)..(354)
caggtccagctgcagcagtctggggctgaactggcaaaacctggggcctcagtgaagatgtcctgcaaggcttctggctacacctttactacctactggatgcactgggtaaaacagaggcctggacagggtctggaatggattggatacattaatcctagcagtggttatactgagtacaatcagaagttcaaggacaaggccacattgactgcagacaaatcctccagcacagcctacatgcaactaagcagcctgacatctgaggactcttcagtctattactgtgcaagaaagggtagtaacagggggtttgcttactggggccaagggactctggtcactgtctcttcn

SEQ ID NO: 111 - protein, 118 aa, Mus musculus
  misc_feature (118)..(118): The 'Xaa' at location 118 stands for Ser.
QVQLQQSGAELAKPGASVKMSCKASGYTFTTYWMHWVKQRPGQGLEWIGYINPSSGYTEYNQKFKDKATLTADKSSSTAYMQLSSLTSEDSSVYYCARKGSNRGFAYWGQGTLVTVSX

SEQ ID NO: 112 - DNA, 312 bp, Mus musculus
  misc_feature (1)..(312): SC16.38 VL
  CDS (1)..(312)
caaattgttctcacccagtctccagcaatcatgtctgcatctccaggggagaaggtcaccatgacctgcagtgccagctcaagtataaattacatgcactggtaccagcagaagccaggcacctcccccaaaagatggatttatgacacatccaaactggcttctggagtccctgctcgcttcagtggcagtgggtctgggacctcttattctctcacaatcagcagcatggaggctgaagatgctgccacttattactgccatcagcggagtacgtggacgttcggtggaggcaccaagctggaaatcaaa

SEQ ID NO: 113 - protein, 104 aa, Mus musculus
QIVLTQSPAIMSASPGEKVTMTCSASSSINYMHWYQQKPGTSPKRWIYDTSKLASGVPARFSGSGSGTSYSLTISSMEAEDAATYYCHQRSTWTFGGGTKLEIK

SEQ ID NO: 114 - DNA, 348 bp, Mus musculus
  misc_feature (1)..(348): SC16.38 VH
  CDS (1)..(348)
gaggttcagctgcagcagtctggggcagagcttgtgaagccaggggcctcagtcaagttgtcctgcacagtttctggcttcaacattaaagacacctatatacactgggtgaagcagaggcctgaacagggcctggagtggattggaaggattgatcctgcgaatggtaatactaaatatgacccgaagttccagggcaaggccactataacagcagacacatcctccaacacagcctacctgcagctcagcagcctgacatctgaggacactgccgtctattactgtgctagaccgacggggtactttgaatactggggccaaggcaccactctcacagtctcctca

SEQ ID NO: 115 - protein, 116 aa, Mus musculus
EVQLQQSGAELVKPGASVKLSCTVSGFNIKDTYIHWVKQRPEQGLEWIGRIDPANGNTKYDPKFQGKATITADTSSNTAYLQLSSLTSEDTAVYYCARPTGYFEYWGQGTTLTVSS

SEQ ID NO: 116 - DNA, 321 bp, Mus musculus
  misc_feature (1)..(321): SC16.41 VL
  CDS (1)..(321)
gatatccagatgacacagactacatcctccctgtctgcctctttgggagacagagtcaccatcagttgcagggcaagtcaggatgttatcaattatttaaactggtatcagcagaaaccagatggaactgttaaactcctgatctactacacatcaaggttacactcaggagtcccatcaaggttcagtggcagtgggtctaggacagattattctctcaccatcagcaacctggaacctgaagatattgccacttactattgtcagcagtatagtgagcgtccgtacacgttcggaggggggaccaagctggaaataaaa

SEQ ID NO: 117 - protein, 107 aa, Mus musculus
DIQMTQTTSSLSASLGDRVTISCRASQDVINYLNWYQQKPDGTVKLLIYYTSRLHSGVPSRFSGSGSRTDYSLTISNLEPEDIATYYCQQYSERPYTFGGGTKLEIK

SEQ ID NO: 118 - DNA, 351 bp, Mus musculus
  misc_feature (1)..(351): SC16.41 VH
  CDS (1)..(351)
gaagtgaagcttgaggagtctggaggaggcttggtgcaatttggaggatccatgaaactctcttgtgctgcttctggattcacttttagtgatgcctggatggactgggtccgccagtctccagagaaggggcttgagtgggttgctgaaattagaaacaaagctaataatcatgcaacatattatcctgagtctgtgaaagggaggttcaccatctcaagagatgattccaaaagtagagtgtacctgcaaatgaacaacttaagagctgaagacactggcatttattactgtacgggttactcctcgtttgcttactggggccaagggactctggtcactgtctctgca

SEQ ID NO: 119 - protein, 117 aa, Mus musculus
EVKLEESGGGLVQFGGSMKLSCAASGFTFSDAWMDWVRQSPEKGLEWVAEIRNKANNHATYYPESVKGRFTISRDDSKSRVYLQMNNLRAEDTGIYYCTGYSSFAYWGQGTLVTVSA

SEQ ID NO: 120 - DNA, 336 bp, Mus musculus
  misc_feature (1)..(336): SC16.42 VL
  CDS (1)..(336)
gatgttttgatgacacagtctccactctccctgtctgtcagtcttggagatcaagcctccatctcttgtagatctagtcagaacattgtacacagtgatagatacacctatttagaatggtacctgcagaaaccaggccagtcgccaaaactcctgatatatggggtttccaaccgattttctggggtcccagacaggttcagtggcagtggatcagggacagatttcacactcaagatcagcagagtggaggctgaggatatgggagtttattactgctttcaaggtacacatgttccgtacacgttcggaggggggaccaagctggaaataaaa

SEQ ID NO: 121 - protein, 112 aa, Mus musculus
DVLMTQSPLSLSVSLGDQASISCRSSQNIVHSDRYTYLEWYLQKPGQSPKLLIYGVSNRFSGVPDRFSGSGSGTDFTLKISRVEAEDMGVYYCFQGTHVPYTFGGGTKLEIK

SEQ ID NO: 122 - DNA, 354 bp, Mus musculus
  misc_feature (1)..(354): SC16.42 VH
  CDS (1)..(354)
cagatccagttggtgcagtctggacctgaactgaagaagcctggagagacagtcaagatctcctgcaaggcttctgggtataccttcacaactgctggaatgcagtgggtgcaaaagatgccaggaaagggttttaagtggattggctggataaacacccactctggagagccaaaatatgcagatgacttcaagggacggtttgccttctctttggaaacctctgccagcactgcctatttacagataagcaacctcaaagacgaggacacggctacgtttttctgtgcgcccctatggtccgatagtagttttgcttactggggccaaggaactctggtcactgtctctgca

SEQ ID NO: 123 - protein, 118 aa, Mus musculus
QIQLVQSGPELKKPGETVKISCKASGYTFTTAGMQWVQKMPGKGFKWIGWINTHSGEPKYADDFKGRFAFSLETSASTAYLQISNLKDEDTATFFCAPLWSDSSFAYWGQGTLVTVSA

SEQ ID NO: 124 - DNA, 321 bp, Mus musculus
  misc_feature (1)..(321): SC16.45 VL
  CDS (1)..(321)
gaaatccagatgacccagtctccatcctctatgtctgcatctctgggagacagaataaccatcacttgccaggcaactcaagacattgttaagaatttaaactggtatcagcagaaaccagggaaacccccttcattcctgatctattatgcaactgaactggcagaaggggtcccagcaaggttcagtggcagtgggtctgggtcagactattctctgacaatcagcaacctggagtctgaagattttgcagactatcactgtctacagttttatgagtttccgttcacgttcggtgctgggaccaagctggagctgaaa

SEQ ID NO: 125 - protein, 107 aa, Mus musculus
EIQMTQSPSSMSASLGDRITITCQATQDIVKNLNWYQQKPGKPPSFLIYYATELAEGVPARFSGSGSGSDYSLTISNLESEDFADYHCLQFYEFPFTFGAGTKLELK

SEQ ID NO: 126 - DNA, 363 bp, Mus musculus
  misc_feature (1)..(363): SC16.45 VH
  CDS (1)..(363)
caggtccagctgcagcagtctggagctgacctggtaaggcctgggacttcagtgaaggtgtcctgcaaggcttctggatactccttcactaattacctgatagagtgggtaaagcagaggccaggacagggccttgagtggattggagtgattaatcctggaagtggtggaactcactacaatgagaaattcaaggacaaggcagttctgactgcagacaaatcctccactactgcccacatgcagctcagcagcctgacatctgatgactctgcggtctatttctgtgcaagatccccctatgattataacgatggtgctatggactactggggtcaaggaacctcagtcaccgtctcttca

SEQ ID NO: 127 - protein, 121 aa, Mus musculus
QVQLQQSGADLVRPGTSVKVSCKASGYSFTNYLIEWVKQRPGQGLEWIGVINPGSGGTHYNEKFKDKAVLTADKSSTTAHMQLSSLTSDDSAVYFCARSPYDYNDGAMDYWGQGTSVTVSS

SEQ ID NO: 128 - DNA, 336 bp, Mus musculus
  misc_feature (1)..(336): SC16.47 VL
  CDS (1)..(336)
gatgttgttctgacccagtctccactctctctgcctgtcaatattggagatcaagcctctatctcttgcaagtctactaagagtcttctgaatagtgatggattcacttatttggactggtatttgcagaggccaggccagtctccacaattcctaatatatttggtttctaatcgattttctggagttccagacaggttcagtggcagtgggtcaggaacagatttcacactcaagatcagcagagtggaggctgaggatttgggagtatattattgcttccagagtaactatcttccgctcacgttcggtgctgggaccaagctggagctgaga

SEQ ID NO: 129 - protein, 112 aa, Mus musculus
DVVLTQSPLSLPVNIGDQASISCKSTKSLLNSDGFTYLDWYLQRPGQSPQFLIYLVSNRFSGVPDRFSGSGSGTDFTLKISRVEAEDLGVYYCFQSNYLPLTFGAGTKLELR

SEQ ID NO: 130 - DNA, 357 bp, Mus musculus
  misc_feature (1)..(357): SC16.47 VH
  CDS (1)..(357)
gaggtccaactgcagcagtctggacctgagctggtgaagcctggggcttcagtgaagatatcctgcaaggcttctggttactcattcagtcgtttctatatgcactgggtgaagcaaagtcctgaaaatagtcttgagtggattggagagattaatcctagcactgggggtacaagctacaaccagaagttcaagggcaaggccacattaactgtagataaatcctccagcacagcctacatgcagctcaagagcctgacatctgaagagtctgcagtctattactgtactaggggttacgggagcaactgttacttcgatgtctggggcgcagggaccacggtcaccgtctccaca

SEQ ID NO: 131 - protein, 119 aa, Mus musculus
EVQLQQSGPELVKPGASVKISCKASGYSFSRFYMHWVKQSPENSLEWIGEINPSTGGTSYNQKFKGKATLTVDKSSSTAYMQLKSLTSEESAVYYCTRGYGSNCYFDVWGAGTTVTVST

SEQ ID NO: 132 - DNA, 321 bp, Mus musculus
  misc_feature (1)..(321): SC16.49 VL
  CDS (1)..(321)
gacatcaagatgacccagtctccatcttccatgtatgcatctctaggagagagagtcactatcacttgcaaggcgagtcaggacattaatagttatttaagctggttccagcagaaaccagggaaatctcctaagaccctgatctatcgagcaaacagattggtagatggggtcccatcaaggttcagtggcagtggatctgggcaagattattctctcaccatcaccagcctggagtatgaagatatgggaatttattattgtctacagtatgatgaatttccgctcacgttcggtgctgggaccaagctggagctgaaa

SEQ ID NO: 133 - protein, 107 aa, Mus musculus
DIKMTQSPSSMYASLGERVTITCKASQDINSYLSWFQQKPGKSPKTLIYRANRLVDGVPSRFSGSGSGQDYSLTITSLEYEDMGIYYCLQYDEFPLTFGAGTKLELK

SEQ ID NO: 134 - DNA, 351 bp, Mus musculus
  misc_feature (1)..(351): SC16.49 VH
  CDS (1)..(351)
caggttcaactgcagcagtctggacctgagctggtgaagcctgggactttagtgaagatatcctgcaaggcttctggttacaccttcacaagctacgatataaactgggtgaagcagaggcctggacagggacttgaatggattggatggatttatcctggagatggtaatactaagtacagtgagaaattcaagggcaaggccacactgactgcagacaaatcctccagcacagcctacatgcagctcaccagcctgacttctgagaactctgcagtctatttctgtgcaagagactatgattacccttttgcttactggggccaagggactctggtcactgtctctgca

SEQ ID NO: 135 - protein, 117 aa, Mus musculus
QVQLQQSGPELVKPGTLVKISCKASGYTFTSYDINWVKQRPGQGLEWIGWIYPGDGNTKYSEKFKGKATLTADKSSSTAYMQLTSLTSENSAVYFCARDYDYPFAYWGQGTLVTVSA

SEQ ID NO: 136 - DNA, 318 bp, Mus musculus
  misc_feature (1)..(318): SC16.50 VL
  CDS (1)..(318)
gatatccagatgacacagactacatcctccctgtctgcctctctgggagacagagtcaccatcagttgcagggcaagtcaggacattagcaattatttaaactggtatcagcagaaaccagatggaactgttaaactcctgatctactacacatcaagattacactcaggagtcccatcaaggttcagtggcagtgggtctggtacagattattctctcaccattagcaacctggagcaagaagatattgccacttacttttgccaacagggtaatacgcttcggacgttcggtggaggcaccaagctggaaatcaaa

SEQ ID NO: 137 - protein, 106 aa, Mus musculus
DIQMTQTTSSLSASLGDRVTISCRASQDISNYLNWYQQKPDGTVKLLIYYTSRLHSGVPSRFSGSGSGTDYSLTISNLEQEDIATYFCQQGNTLRTFGGGTKLEIK

SEQ ID NO: 138 - DNA, 363 bp, Mus musculus
  misc_feature (1)..(363): SC16.50 VH
  CDS (1)..(363)
gaagtgcagctggtggagtgtgggggatgcttagtgaagcctggagggtacctgaaactctcctgtgcagcctctggattcactttcagtagctatgccatgtcttgggttcgccagtctccagagaagaggctggagtgggtcgcagaaatcagtattggtggtagctacacctactatccagacactgtgacgggccgattcaccatctccagagacaatgccaagaacaccctgtacctggaaatgagcagtctgaggtctgaggacacggccatgtattactgtgcaagggagggctatgattacgacgtgagagctatggactactggggtcaaggaacctcagtcaccgtctcctca

SEQ ID NO: 139 - protein, 121 aa, Mus musculus
EVQLVECGGCLVKPGGYLKLSCAASGFTFSSYAMSWVRQSPEKRLEWVAEISIGGSYTYYPDTVTGRFTISRDNAKNTLYLEMSSLRSEDTAMYYCAREGYDYDVRAMDYWGQGTSVTVSS

SEQ ID NO: 140 - DNA, 321 bp, Mus musculus
  misc_feature (1)..(321): SC16.52 VL
  CDS (1)..(321)
gacatccagatgattcagtctccatcgtccatgtttgcctctctgggagacagagtcagtctctcttgtcgggctagtcagggcattagagggactttagactggtatcaacagaaaccaaatggaactattaaactcctgatctactccacatccaatttaaattctggtgtcccatcaaggttcagtggcagtgggtctgggtcagattattctctcaccatcagcagcctagagtctgaagattttgcagactattactgtctacagcgtaatgcgtatcctctcacgttcggtgctgggaccaagctggagctgaaa

SEQ ID NO: 141 - protein, 107 aa, Mus musculus
DIQMIQSPSSMFASLGDRVSLSCRASQGIRGTLDWYQQKPNGTIKLLIYSTSNLNSGVPSRFSGSGSGSDYSLTISSLESEDFADYYCLQRNAYPLTFGAGTKLELK

SEQ ID NO: 142 - DNA, 357 bp, Mus musculus
  misc_feature (1)..(357): SC16.52 VH
  CDS (1)..(357)
caggtgcagctgaaggagtcaggacctggcctggtggcgccctcacagagcctgtccatcacgtgcgctgtctctggattttcattaaccagctttgcaatacactggtttcgcaagcctccaggaaagggtctggagtggctgggagtaatatggactggtggaaccacaaattataattcggctctcatgtccagactgagcatcagcaaagacaactccaagagccaagttttcttaaaaatgaacagtctgcaaactgatgacacagccatgtactactgtgccagagacgattacgacaataattatgctatggactactggggtcaaggaacctcagtcaccgtctcctca

SEQ ID NO: 143 - protein, 119 aa, Mus musculus
QVQLKESGPGLVAPSQSLSITCAVSGFSLTSFAIHWFRKPPGKGLEWLGVIWTGGTTNYNSALMSRLSISKDNSKSQVFLKMNSLQTDDTAMYYCARDDYDNNYAMDYWGQGTSVTVSS

SEQ ID NO: 144 - DNA, 321 bp, Mus musculus
  misc_feature (1)..(321): SC16.55 VL
  CDS (1)..(321)
gacatcaagatgacccagtctccatcttccatgtatgcatctctaggagagagagtcactatcacttgcaaggcgagtcaggacattaatagctatttaaactggttccagcagaaaccagggaaatctcctaagaccctgatctatcgtgcaaacagattggtagatggggtcccatcaaggttcagtggcagtggatctgggcaagattattctctcaccatcagcagcctggagtatgaagatatgggaatttattattgtctacagtatgatgagtttccgtacacgttcggaggggggaccaagctggaaataaaa

SEQ ID NO: 145 - protein, 107 aa, Mus musculus
DIKMTQSPSSMYASLGERVTITCKASQDINSYLNWFQQKPGKSPKTLIYRANRLVDGVPSRFSGSGSGQDYSLTISSLEYEDMGIYYCLQYDEFPYTFGGGTKLEIK

SEQ ID NO: 146 - DNA, 351 bp, Mus musculus
  misc_feature (1)..(351): SC16.55 VH
  CDS (1)..(351)
gaggtgcagcttgttgagtctggtggaggattggtgcagcctaaagggtcattgaaactctcatgtgcagtctctgcattcaccttcactacctacgccatgaactgggtccgccaggctccaggaaagggtttggagtgggttgctcgcataagaaataaaagtaataattatgcaacatattatgccgattcagtgaaagacaggttcaccatctccagagatgattcacaaagcatgctctatctgcaaatgaacaacttgaaaattgaggacacagccatgtattactgtgtgttctactatgattacgtctactggggccaagggactctggtcactgtctctgca

SEQ ID NO: 147 - protein, 117 aa, Mus musculus
EVQLVESGGGLVQPKGSLKLSCAVSAFTFTTYAMNWVRQAPGKGLEWVARIRNKSNNYATYYADSVKDRFTISRDDSQSMLYLQMNNLKIEDTAMYYCVFYYDYVYWGQGTLVTVSA

SEQ ID NO: 148 - DNA, 321 bp, Mus musculus
  misc_feature (1)..(321): SC16.56 VL
  CDS (1)..(321)
agtattgtgatgacccagactcccaaattcctgcttgtatcagcaggagacagggttaccataacctgcaaggccagtcagagtgtgagtaatgatgtagtatggtaccaacagaagccagggcagtctcctaaactgctgatatactatgcatccaatcgctacactggagtccctgatcgcttcgctggcagtggatatgggacggatttctctttcaccatcagcactgtgcaggctgaagacctggcagtttatttctgtcagcaggattatacctctccgtggacgttcggtggaggcaccaagctggaaatcaga

SEQ ID NO: 149 - protein, 107 aa, Mus musculus
SIVMTQTPKFLLVSAGDRVTITCKASQSVSNDVVWYQQKPGQSPKLLIYYASNRYTGVPDRFAGSGYGTDFSFTISTVQAEDLAVYFCQQDYTSPWTFGGGTKLEIR

SEQ ID NO: 150 - DNA, 354 bp, Mus musculus
  misc_feature (1)..(354): SC16.56 VH
  CDS (1)..(354)
cagatccagttggtgcagtctggacctgaactgaagaagcctggagagacagtcaagatctcctgcaaggcttctgggtataccttcacaaactatggaatgaactgggtgaagcaggctccaggaaagggtttaaagtggatggcctggataaacacctacactggagagccaacatatgctgatgacttcaagggacggtttgccttctctttggaaacctctgccagcactgcctctttgcagatcatcaacctcaaaaatgaggacacggctacatatttctgtgcaaggatcggcgatagtagtccctctgactactgggggcagggcaccactctcacagtctcctca

SEQ ID NO: 151 - protein, 118 aa, Mus musculus
QIQLVQSGPELKKPGETVKISCKASGYTFTNYGMNWVKQAPGKGLKWMAWINTYTGEPTYADDFKGRFAFSLETSASTASLQIINLKNEDTATYFCARIGDSSPSDYWGQGTTLTVSS

SEQ ID NO: 152 - DNA, 321 bp, Mus musculus
  misc_feature (1)..(321): SC16.57 VL
  CDS (1)..(321)
gacattgtgatgacccagtctcacaaattcatgtccatatcagtaggagacagggtcagcatcacctgcaaggccagtcaggatgtgagtatttttgtagcctggtatcaacagaaaccaggacaatctcctaaactactgatttactcggcatcctaccggtacactggagtccctgatcgcttcactggcagtggatctgggacggatttcattttcaccatcagcagtgtgcaggctgaagacctggcagtttactactgtcagcaacattatggtactccattcacgttcggctcggggacaaagttgaaaataaga

SEQ ID NO: 153 - protein, 107 aa, Mus musculus
DIVMTQSHKFMSISVGDRVSITCKASQDVSIFVAWYQQKPGQSPKLLIYSASYRYTGVPDRFTGSGSGTDFIFTISSVQAEDLAVYYCQQHYGTPFTFGSGTKLKIR

SEQ ID NO: 154 - DNA, 354 bp, Mus musculus
  misc_feature (1)..(354): SC16.57 VH
  CDS (1)..(354)
gaagtgaaactggtggagtctgggggagacttagtgaagcctggagggtccctaaaactctcctgtgcagcctctggattcgctttcagtagttatgacatgtcttgggttcgccagactccggagaagagactggagtgggtcgcaaccattagcagtggtggtagttacacctattatccagacagtgtgaagggccgattcaccatctccagagacaatgtcagggacaccctgtacctgcaaatgagcagtttgaggtctgaggacacggccttgtattactgtgcaagacaggcaattgggacgtactttgactactggggccaaggcaccactctcacagtctcctca

SEQ ID NO: 155 - protein, 118 aa, Mus musculus
EVKLVESGGDLVKPGGSLKLSCAASGFAFSSYDMSWVRQTPEKRLEWVATISSGGSYTYYPDSVKGRFTISRDNVRDTLYLQMSSLRSEDTALYYCARQAIGTYFDYWGQGTTLTVSS

SEQ ID NO: 156 - DNA, 321 bp, Mus musculus
  misc_feature (1)..(321): SC16.58 VL
  CDS (1)..(321)
gacatccagatgactcagtctccagcctccctatcttcatctgtgggagaaactgtcaccatcacatgtcgagcaagtgagaatatttacagttatttagcatggtatcagcagaaacagggaaaatctcctcagctcctggtctataatgcaaaaactttagcagaaggtgtgccatcaaggttcagtggcagtggatcaggcacacagttttctctgaagatcaacagcctgcagcctgaagattttgggacttattactgtcaacatcattatgattctccgctcacgttcggtgctgggaccaagctggagctgaga

SEQ ID NO: 157 - protein, 107 aa, Mus musculus
DIQMTQSPASLSSSVGETVTITCRASENIYSYLAWYQQKQGKSPQLLVYNAKTLAEGVPSRFSGSGSGTQFSLKINSLQPEDFGTYYCQHHYDSPLTFGAGTKLELR

SEQ ID NO: 158 - DNA, 360 bp, Mus musculus
  misc_feature (1)..(360): SC16.58 VH
  CDS (1)..(360)
gatgtgcagctggtggagtctgggggaggcttagtgcagcctggagggtcccggaaactctcctgtgcagcctctggattcactttcagtagctttggaatgcactgggttcgtcaggctccagagaaggggctggagtgggtcgcatacattagtagtggcagtagtaacatctactatgcagacacagtgaagggccgattcaccatctccagagacaatcccaagaacaccctgttcctgcaaatgaccagtctaaggtctgaggacacggccatgtattactgtgcaagaggctactatggtaactacgatgctatggactactggggtcaaggaacctcagtcaccgtctcctca

SEQ ID NO: 159 - protein, 120 aa, Mus musculus
DVQLVESGGGLVQPGGSRKLSCAASGFTFSSFGMHWVRQAPEKGLEWVAYISSGSSNIYYADTVKGRFTISRDNPKNTLFLQMTSLRSEDTAMYYCARGYYGNYDAMDYWGQGTSVTVSS

SEQ ID NO: 160 - DNA, 339 bp, Mus musculus
  misc_feature (1)..(339): SC16.61 VL
  CDS (1)..(339)
gatattgtgatgacacagtctacatcctccctggctatgtcagtaggacagaaggtcactatgagctgcaagtccagtcagagccttttaaatagtagcaatcaaaagaattatttggcctggtaccagcaggaaccaggacagtctcctaaacttctggtatcctttgcatccactagggaatctggggtccctgatcgcttcacaggcagtggatctgggacagatttcactcttaccatcagcggtgtgcaggctgaagacctggcagtttattactgtcagcaacattatagcattccgctcacgttcggtgctggaaccaagctggagctgaaa

SEQ ID NO: 161 - protein, 113 aa, Mus musculus
DIVMTQSTSSLAMSVGQKVTMSCKSSQSLLNSSNQKNYLAWYQQEPGQSPKLLVSFASTRESGVPDRFTGSGSGTDFTLTISGVQAEDLAVYYCQQHYSIPLTFGAGTKLELK

SEQ ID NO: 162 - DNA, 360 bp, Mus musculus
  misc_feature (1)..(360): SC16.61 VH
  CDS (1)..(360)
gaggtcctgctccaacggtctggacctgacctggtgaagcctggggcttcagtgacgataccctgcaaggcttctggatacacattcactgactacaacatggactgggtgaagcagagccatggaaagagccttgagtggattggaaatattaatacttacaatggtggtactatctacaaccagaagttcaagggcaaggccacattgactgtagacaagccctccagcacagcctacatggagctccgcagcctgacatctgaggacactgcagtctattactgtgcaagacgtctacggtatgggggacactactttgactactggggccaaggcaccgctctcacagtctcctca

SEQ ID NO: 163 - protein, 120 aa, Mus musculus
EVLLQRSGPDLVKPGASVTIPCKASGYTFTDYNMDWVKQSHGKSLEWIGNINTYNGGTIYNQKFKGKATLTVDKPSSTAYMELRSLTSEDTAVYYCARRLRYGGHYFDYWGQGTALTVSS

SEQ ID NO: 164 - DNA, 321 bp, Mus musculus
  misc_feature (1)..(321): SC16.62 VL
  CDS (1)..(321)
gacatcaagatgacccagtctccatcttccatgtatgcatctctaggagagagagtcactatcacttgcaaggcgagtcaggacattaatagctttttaagctggttccagcggaaaccagggaaatctccgaagaccctgatctatcgtgcaaacagattagtagatggagtcccatcaaggttcactggcagtggatctgggcaagaattttctctcaccatcagcagcctggagtatgaagatttgggaatttattattgtcttcagtatgatgagtttccgtacacgttcggaggggggaccaagctggaaataaaa

SEQ ID NO: 165 - protein, 107 aa, Mus musculus
DIKMTQSPSSMYASLGERVTITCKASQDINSFLSWFQRKPGKSPKTLIYRANRLVDGVPSRFTGSGSGQEFSLTISSLEYEDLGIYYCLQYDEFPYTFGGGTKLEIK

SEQ ID NO: 166 - DNA, 351 bp, Mus musculus
  misc_feature (1)..(351): SC16.62 VH
  CDS (1)..(351)
gaagtgatgctggtagagtctgggggagacttagtgaagcctggagggtccctgaaactctcctgtgcagcctctggattcactttcagtagctatgccatgtcttgggttcgccagactccggagaagaggctggagtgggtcgcatacattagcggtggtggtgatcacatctattatccagacagtgtgaggggccgattcaccatctccagagacaatgccaaggacaccctgtacctgcaaatgagcagtctgaggtctgaggacacggccttgtatgactgtgcaagagtgagagactggtacttcgatgtctggggcgcagggaccacggtcaccgtctcctca

SEQ ID NO: 167 - protein, 117 aa, Mus musculus
EVMLVESGGDLVKPGGSLKLSCAASGFTFSSYAMSWVRQTPEKRLEWVAYISGGGDHIYYPDSVRGRFTISRDNAKDTLYLQMSSLRSEDTALYDCARVRDWYFDVWGAGTTVTVSS

SEQ ID NO: 168 - DNA, 318 bp, Mus musculus
  misc_feature (1)..(318): SC16.63 VL
  CDS (1)..(318)
caaattgttctcacccagtctccagcaatcatgtctgcatctccaggggagaaggtcaccatgacctgcagtgccagctcaagtgtcagttacatgtactggtaccagcagaagtcaggcacctcccccaaaagatggatttatgacacatccaaactggcttctggagtccctgctcgcttcagtggcagtgggtctgggacctcttactctctcacaatcagcagcatggaggctgaagatgctgccacttattactgccagcagtggagtagtaacccgtacacgttcggaggggggaccaagctggaaataaar

SEQ ID NO: 169 - protein, 106 aa, Mus musculus
QIVLTQSPAIMSASPGEKVTMTCSASSSVSYMYWYQQKSGTSPKRWIYDTSKLASGVPARFSGSGSGTSYSLTISSMEAEDAATYYCQQWSSNPYTFGGGTKLEIK

SEQ ID NO: 170 - DNA, 342 bp, Mus musculus
  misc_feature (1)..(342): SC16.63 VH
  CDS (1)..(342)
caggttcagctgcagcagtctggaactgagctgctgaggcctggggcctcagtgaagatatcctgcaaggctactggctacacattcagtagctactggatggagtgggtaaagcagaggcctggacatggccttgagtggattggagagattttacctggaagtggtactactcagtacaatgagaagttcaagggcaaggccaccttcactgcagatacatcctccaacacagcctacatgcatctcagcagcctgacatctgaggactctgccgtctattactgtgcaagagggactaactctctctggggccaagggactctggtcactgtctctgca

SEQ ID NO: 171 - protein, 114 aa, Mus musculus
QVQLQQSGTELLRPGASVKISCKATGYTFSSYWMEWVKQRPGHGLEWIGEILPGSGTTQYNEKFKGKATFTADTSSNTAYMHLSSLTSEDSAVYYCARGTNSLWGQGTLVTVSA

SEQ ID NO: 172 - DNA, 318 bp, Mus musculus
  misc_feature (1)..(318): SC16.65 VL
  CDS (1)..(318)
caaattgttctcacccagtctccagcactcatgtctgcatctccaggggagaaggtcaccatgacctgcagtgtcacctcaagtgtaagttacatgtactggtaccagcagaagcctagatcctcccccaaaccctggatttatctcacatccaacctggcttctggagtccctgctcgcttcagtggcagtgggtctgggacctcttactctctcacaatcagcagcgtggaggctgaagatgctgccacttattactgccagcagtggaggaataacccattcacgttcggctcggggacaaaggtggaaataaaa

SEQ ID NO: 173 - protein, 106 aa, Mus musculus
QIVLTQSPALMSASPGEKVTMTCSVTSSVSYMYWYQQKPRSSPKPWIYLTSNLASGVPARFSGSGSGTSYSLTISSVEAEDAATYYCQQWRNNPFTFGSGTKVEIK

SEQ ID NO: 174 - DNA, 372 bp, Mus musculus
  misc_feature (1)..(372): SC16.65 VH
  CDS (1)..(372)
caggttactctgaaagagtctggccctgggatattgcagccctcccagaccctcagtctgacttgttctttctctgggttttcactgagcacttctggtatgggtgtaggctggattcgtcagccatcagggaagggtctggagtggctggcactcatttggtgggatgatgtcaagcgctataatccagccctgaagagtcgactgactatctccaaggatgcctccagcagccaggtcttcctcaagatcgccagtgtggacactgcagatactgccacatactactgtgctcgaatagcttcctatgattacgacgtagtctatgctatggactactggggtcaaggaacctcagtcagcgtctcctca

SEQ ID NO: 175 - protein, 124 aa, Mus musculus
QVTLKESGPGILQPSQTLSLTCSFSGFSLSTSGMGVGWIRQPSGKGLEWLALIWWDDVKRYNPALKSRLTISKDASSSQVFLKIASVDTADTATYYCARIASYDYDVVYAMDYWGQGTSVSVSS

SEQ ID NO: 176 - DNA, 327 bp, Mus musculus
  misc_feature (1)..(327): SC16.67 VL
  CDS (1)..(327)
caggctgttgtgactcaggaatctgcactcaccacatcacctggtgaaacagtcacactcacttgtcgctcaagtactggggctgttacaactagtaactatgccaactggatccaagaaaaaccagatcatttattcactggtctaataggtggtaccaacaaccgagctccaggtgttcctgccagattctcaggctccctgattggagacaaggctgccctcaccatcacaggggcacagactgaggatgaggcaatatatttctgtggtctatggtacagcaaccatttggtgttcggtggaggaaccaaactgactgtccta

SEQ ID NO: 177 - protein, 109 aa, Mus musculus
QAVVTQESALTTSPGETVTLTCRSSTGAVTTSNYANWIQEKPDHLFTGLIGGTNNRAPGVPARFSGSLIGDKAALTITGAQTEDEAIYFCGLWYSNHLVFGGGTKLTVL

SEQ ID NO: 178 - DNA, 351 bp, Mus musculus
  misc_feature (1)..(351): SC16.67 VH
  CDS (1)..(351)
gaggtgcagcttgttgagactggtggaggattggtgcagcctaaagggtcattgaaactctcatgtgcagtctctgcattcaccttcactacctacgccatgaactgggtccgccaggctccaggaaagggtttggagtgggttgctcgcataagaaataaaagtaataattatgcaacatattatgccgattcagtgaaagacaggttcaccatctccagagatgattcacaaagcatgctctatctgcaaatgaacaacttgaaaattgaggacacagccatgtattactgtgtgttctactatgattacgtctactggggccaagggactctggtcactgtctctgca

SEQ ID NO: 179 - protein, 117 aa, Mus musculus
EVQLVETGGGLVQPKGSLKLSCAVSAFTFTTYAMNWVRQAPGKGLEWVARIRNKSNNYATYYADSVKDRFTISRDDSQSMLYLQMNNLKIEDTAMYYCVFYYDYVYWGQGTLVTVSA

SEQ ID NO: 180 - DNA, 321 bp, Mus musculus
  misc_feature (1)..(321): SC16.68 VL
  CDS (1)..(321)
gaaacaactgtgacccagtctccagcattcctgtccgtggctacaggagaaaaagtcactatcagatgcataaccagcactgatattgatgatgatatgaactggtaccagcagaagccaggggaacctcctaatgtccttatttcagaaggcaatactcttcgtcctggagtcccatcccgattctccagcagtggctatggcacagattttgtttttacaattgaaaacacgctctcagaagatgttgcagattactactgtttgcaaagtgataacatgcctctcacgttcggtgctgggaccaagctggagctgaaa

SEQ ID NO: 181 - protein, 107 aa, Mus musculus
ETTVTQSPAFLSVATGEKVTIRCITSTDIDDDMNWYQQKPGEPPNVLISEGNTLRPGVPSRFSSSGYGTDFVFTIENTLSEDVADYYCLQSDNMPLTFGAGTKLELK

SEQ ID NO: 182 - DNA, 363 bp, Mus musculus
  misc_feature (1)..(363): SC16.68 VH
  CDS (1)..(363)
caggtgcaactgcagcagcctggggctgagctggtgaagcctggggcctcagtgaagatgtcctgcaaggcttctggctacacatttaccaattacaatatgcactgggtaaagcagacacctggacagggcctggaatggattggggctatttttccaggaaatggtggtacttcctacaatcagaagttcaaaggcaaggccacattgactgcagacaaatcctccagcacagcctacatgcagctcaccagtttgacatctggggactctgcagtctattactgtgcaagatggggctacggtagtggcctttatgctatggactactggggtcaaggaacctcagtcaccgtctcctca

SEQ ID NO: 183 - protein, 121 aa, Mus musculus
QVQLQQPGAELVKPGASVKMSCKASGYTFTNYNMHWVKQTPGQGLEWIGAIFPGNGGTSYNQKFKGKATLTADKSSSTAYMQLTSLTSGDSAVYYCARWGYGSGLYAMDYWGQGTSVTVSS

SEQ ID NO: 184 - DNA, 318 bp, Mus musculus
  misc_feature (1)..(318): SC16.72 VL
  CDS (1)..(318)
gaaaatgtactcacccagtctccagcaatcatgtctgcatctctaggggagaaggtcaccatgagctgcagggccagctcaagtgtaaattacatgtcctggtaccagcagaagtcagatgcctcccccaaactatggatttattacacatccaacctggctcctggagtcccagctcgcttcagtggcagtgggtctgggaactcttattctctcacaatcagcagcatggagggtgaagatgctgccacttattactgccagcagtttactagttccccgtacacgttcggaggggggaccaagctggaaataaaa

SEQ ID NO: 185 - protein, 106 aa, Mus musculus
ENVLTQSPAIMSASLGEKVTMSCRASSSVNYMSWYQQKSDASPKLWIYYTSNLAPGVPARFSGSGSGNSYSLTISSMEGEDAATYYCQQFTSSPYTFGGGTKLEIK

SEQ ID NO: 186 - DNA, 351 bp, Mus musculus
  misc_feature (1)..(351): SC16.72 VH
  CDS (1)..(351)
gaggtccagctgcagcagtctggacctgagctggtaaagcctggggcttcagtgaagatgtcctgcaaggcttctggatacacattcactagctatgttatgcactgggtgaagcagaagcctgggcagggccttgagtggattggatatattaatccttacaatgatggtactaagtacaatgagaagttcaaaggcaaggccacactgacttcagacaaatcctccagcacagcctacatggagctcagcagcctgacctctgaggactctgcggtctattactgtgcaagattgaggtcgagggctatggactactggggtcaaggaacctcagtcaccgtctcctca

SEQ ID NO: 187 - protein, 117 aa, Mus musculus
EVQLQQSGPELVKPGASVKMSCKASGYTFTSYVMHWVKQKPGQGLEWIGYINPYNDGTKYNEKFKGKATLTSDKSSSTAYMELSSLTSEDSAVYYCARLRSRAMDYWGQGTSVTVSS

SEQ ID NO: 188 - DNA, 321 bp, Mus musculus
  misc_feature (1)..(321): SC16.73 VL
  CDS (1)..(321)
gacatccagatgacccagtctccatcctccttatctgcctctctgggagagagagtcagtctcacttgtcgggcaagtcaggacattggttatagcttaaactggcttcagcaggaaccagatggaactattaaacgcctgatctacgccacatccagtttagattctggtgtccccaaaaggttcagtggcagtaggtctgggtcagattattctctcaccatcagcagccttgagtctgaagattttgtagactattactgtctacaatatgctagttctccgtggacgttcggtggaggcaccaagctggaaatcaaa

SEQ ID NO: 189 - protein, 107 aa, Mus musculus
DIQMTQSPSSLSASLGERVSLTCRASQDIGYSLNWLQQEPDGTIKRLIYATSSLDSGVPKRFSGSRSGSDYSLTISSLESEDFVDYYCLQYASSPWTFGGGTKLEIK

SEQ ID NO: 190 - DNA, 369 bp, Mus musculus
  misc_feature (1)..(369): SC16.73 VH
  CDS (1)..(369)
caggtgcagctgcagcagtctggagctgagctgatgaagcctggggcctcagtgaagatatcctgcaaggctaatggctacacattcagtagctactggatagagtggttaaggcagaggcctggacatggccttgagtggattggagagattttacctggaagtgataatagtaattataatgagaagttcaagggcaaggccacattcactgcagatacatcctccaacacagcctacatgcaactcagcagcctgacatctgaggaatctgccgtctattactgtacaaggggattacgacgagacggctcatattactatgttatggaacattggggtcaaggaacctcagtcaccgtctcctca

SEQ ID NO: 191 - protein, 123 aa, Mus musculus
QVQLQQSGAELMKPGASVKISCKANGYTFSSYWIEWLRQRPGHGLEWIGEILPGSDNSNYNEKFKGKATFTADTSSNTAYMQLSSLTSEESAVYYCTRGLRRDGSYYYVMEHWGQGTSVTVSS

SEQ ID NO: 192 - DNA, 321 bp, Mus musculus
  misc_feature (1)..(321): SC16.78 VL
  CDS (1)..(321)
gacatcaagatgacccagtctccatcttccatgtatgcatctctaggagagagagtcactatcacttgcaaggcgagtcaggacattaatagctatttaagctggttccagcagaagccagggagatctcctaagaccctgatctatcgtgcaaacagattggtagatggggtcccatcaaggttcagtggcagtggatctgggcaagattattctctcaccatcagcagcctggactatgaagatatgggaatttattattgtctacagtatgatgaatttccattcacgttcggctcggggacaaagttggarathaar

SEQ ID NO: 193 - protein, 107 aa, Mus musculus
DIKMTQSPSSMYASLGERVTITCKASQDINSYLSWFQQKPGRSPKTLIYRANRLVDGVPSRFSGSGSGQDYSLTISSLDYEDMGIYYCLQYDEFPFTFGSGTKLEIK

SEQ ID NO: 194 - DNA, 357 bp, Mus musculus
  misc_feature (1)..(357): SC16.78 VH
  CDS (1)..(357)
gaagtgaagctggtggagtctgggggaggcttagtgaagcctggagggtccctgaaactctcctgtgcagcctctggattcactttcggtcgctatgtcatgtcttgggttcgccagactccagaaaagaaactggagtgggtcgcatccattactagtggtggtactacctactatccagacagtgtgaagggccgattcaccatctccagagataatgccaggaacatcctgtacctacaaatgagcagtctgaggtctgaggacacggccatgtattactgtgcaagagtctactatcattacgacgacatctttgcttactggggccaagggactctggtcactgtctctgca

SEQ ID NO: 195 - protein, 119 aa, Mus musculus
EVKLVESGGGLVKPGGSLKLSCAASGFTFGRYVMSWVRQTPEKKLEWVASITSGGTTYYPDSVKGRFTISRDNARNILYLQMSSLRSEDTAMYYCARVYYHYDDIFAYWGQGTLVTVSA

SEQ ID NO: 196 - DNA, 336 bp, Mus musculus
  misc_feature (1)..(336): SC16.79 VL
  CDS (1)..(336)
gacattgtgatgtcacagtctccatcctccctggctgtgtcagcaggagagaaggtcactatgagctgcaaatccagtcagagtctgctcaacagtagaacccgaaagaactacttggcttggtaccagcagaaaccagggcagtctcctaaactgctgatctactgggcatccactagggaatctggggtccctgatcgcttcacaggcagtggatctgggacagatttcactctcaccatcagcagtgtgcaggctgaagacctggcagtttattactgcaagcaatcttataatctttacacgttcggaggggggaccaagctgaaaataaaa

SEQ ID NO: 197 - protein, 112 aa, Mus musculus
DIVMSQSPSSLAVSAGEKVTMSCKSSQSLLNSRTRKNYLAWYQQKPGQSPKLLIYWASTRESGVPDRFTGSGSGTDFTLTISSVQAEDLAVYYCKQSYNLYTFGGGTKLKIK

SEQ ID NO: 198 - DNA, 348 bp, Mus musculus
  misc_feature (1)..(348): SC16.79 VH
  CDS (1)..(348)
gaggtccagctgcaacagtctggacctgagctggtgaagcctggggcttcagtgaagatatcctgcaagacttctggatacacattcactgaatacaccatgcactgggtgaagcagagccatggaaagagccttgagtggattggaggtattaatcctaacaatggtggtactagctacaaccagaagttcaagggcaaggccacattgactgtagacaagtcctccagcacagcctacatggagctccgcagcctgacatctgaggattctgcagtctattactgtgcaaggggtcccgcctggtttgcttactggggccaagggactctggtcactgtctctgca

SEQ ID NO: 199 - protein, 116 aa, Mus musculus
EVQLQQSGPELVKPGASVKISCKTSGYTFTEYTMHWVKQSHGKSLEWIGGINPNNGGTSYNQKFKGKATLTVDKSSSTAYMELRSLTSEDSAVYYCARGPAWFAYWGQGTLVTVSA

SEQ ID NO: 200 - DNA, 321 bp, Mus musculus
  misc_feature (1)..(321): SC16.80 VL
  CDS (1)..(321)
gaaacaactgtgacccagtctccagcatccctgtccatggctataggagaaaaagtcaccatcagatgcataaccagcactgatattgatgatgatatgatctggtaccagcagaagccaggggaacctcctaagctccttatttcagaaggcaatactcttcgtcctggagtcccatcccgattctccagcagtggctatggtacagattttgtttttacaattgaaaacatgctctcagaagatgttgccgattactactgtttgaaaagggatgacttgccttacacgttcggcggggggacacaggtggaaattaaa

SEQ ID NO: 201 - protein, 107 aa, Mus musculus
ETTVTQSPASLSMAIGEKVTIRCITSTDIDDDMIWYQQKPGEPPKLLISEGNTLRPGVPSRFSSSGYGTDFVFTIENMLSEDVADYYCLKRDDLPYTFGGGTQVEIK

SEQ ID NO: 202 - DNA, 351 bp, Mus musculus
  misc_feature (1)..(351): SC16.80 VH
  CDS (1)..(351)
gaggtccagctgcaacagtctggacctgagctggtgaagcctggaggttcaaagaagatatcctgcaaggcttctggttactcattcactggctacagtatgaactgggtgaagcagagccatggaaagaaccttgagtggattggacttattaatccttacagtggtggtactatctacaaccagaaattcaagggcaaggccacattaactgtagacaagtcatccagcacagcctacatggagctcctcagtctgacatctgaggactctgcagtctattactgtgcaagaaggagtgattacccgttagtttactggggccaagggactctggtcactgtctctgca

SEQ ID NO: 203 - protein, 117 aa, Mus musculus
EVQLQQSGPELVKPGGSKKISCKASGYSFTGYSMNWVKQSHGKNLEWIGLINPYSGGTIYNQKFKGKATLTVDKSSSTAYMELLSLTSEDSAVYYCARRSDYPLVYWGQGTLVTVSA

SEQ ID NO: 204 - DNA, 324 bp, Mus musculus
  misc_feature (1)..(324): SC16.81 VL
  CDS (1)..(324)
caaattgttctcacccagtctccagcaatcatgtctgcatctctaggggaacgggtcaccctgacctgcactgccagctcaagtgtaagttccagttacttgcactggtaccagcagaagccaggatcctcccccaaactctggatttatagcacatccaacctggcttctggagtcccaactcgcttcagtggcagtgggtctgggacctcttactctctcagaatcagcagcatggaggctgaagatgctgccacttattactgccaccagtataatcgttccccgctcacgttcggtgctgggaccaagctggagctgaaa

SEQ ID NO: 205 - protein, 108 aa, Mus musculus
QIVLTQSPAIMSASLGERVTLTCTASSSVSSSYLHWYQQKPGSSPKLWIYSTSNLASGVPTRFSGSGSGTSYSLRISSMEAEDAATYYCHQYNRSPLTFGAGTKLELK

SEQ ID NO: 206 - DNA, 351 bp, Mus musculus
  misc_feature (1)..(351): SC16.81 VH
  CDS (1)..(351)
caggtgcagctgaaggagtcaggacctgtcctggtggcgccctcacagagcctgtccatcacttgcactgtctctgggttttcattaaccagctatggtgtacactgggttcgccagcctccaggaaagggtctggagtggctgggagtaatttgggctggtggaagtacaaattataattcagctctcatgtccagactgagcatcagcaaagacaactccaagagccaagttttcttaaaaatgaacagtctgcaaactgatgacacagccatgtactactgtgccaaacagggcaacttctatgctatggactactggggtcaaggaacctcagtcaccgtctcctca

SEQ ID NO: 207 - protein, 117 aa, Mus musculus
QVQLKESGPVLVAPSQSLSITCTVSGFSLTSYGVHWVRQPPGKGLEWLGVIWAGGSTNYNSALMSRLSISKDNSKSQVFLKMNSLQTDDTAMYYCAKQGNFYAMDYWGQGTSVTVSS

SEQ ID NO: 208 - DNA, 318 bp, Mus musculus
  misc_feature (1)..(318): SC16.84 VL
  CDS (1)..(318)
gacatccagatgacacagtctccatcctcactgtctgcatctctgggaggcaaagtcaccatcacttgcaaggcaagccaagacattaagaagtatatagcttggtaccaacacaagcctggaaaaggtcctaggctactcatacattacacatctacattagagccaggcatcccatcaaggttcagtggaagtgggtctgggagagattattccttcagcatcagcaacctggagcctgaagatattgcaacttattattgtctacaatatgatattctgtggacgttcggtggaggcaccaagctggaaatcaaa

SEQ ID NO: 209 - protein, 106 aa, Mus musculus
DIQMTQSPSSLSASLGGKVTITCKASQDIKKYIAWYQHKPGKGPRLLIHYTSTLEPGIPSRFSGSGSGRDYSFSISNLEPEDIATYYCLQYDILWTFGGGTKLEIK

SEQ ID NO: 210 - DNA, 363 bp, Mus musculus
  misc_feature (1)..(363): SC16.84 VH
  CDS (1)..(363)
gaggtccagctgcaacagtctggacctgagctggtgaagcctggagcttcaatgaagatatcctgcaaggcttctggttactcattcactggctacaccatgaactgggtgaagcagagccatggaaagaaccttgagtggattggacttattaatccttacaatggtggtactacctacaaccagaagttcaagggcaaggccacattaactgtagacaagtcatccagcacagcctacatggagctcctcagtctgacatctgaggactctgcagtctattactgtgcattaggttactatggtaactacaggaggtacttcgatgtctggggcgcagggaccacggtcaccgtctcctca

SEQ ID NO: 211 - protein, 121 aa, Mus musculus
EVQLQQSGPELVKPGASMKISCKASGYSFTGYTMNWVKQSHGKNLEWIGLINPYNGGTTYNQKFKGKATLTVDKSSSTAYMELLSLTSEDSAVYYCALGYYGNYRRYFDVWGAGTTVTVSS

SEQ ID NO: 212 - DNA, 324 bp, Mus musculus
  misc_feature (1)..(324): SC16.88 VL
  CDS (1)..(324)
gaaaatgtgctcacccagtctccagcaataatggctgcctctctggggcagaaggtcaccatgacctgcagtgccagctcaagtgtaagttccagttacttgcactggtaccagcagaagtcaggcgcttcccccaaacccttgattcataggacatccaacctggcttctggagtcccagctcgcttcagtggcagtgggtctgggacctcttactctctcacaatcagcagcgtggaggctgaagatgatgcaacttattactgccggcagtggagtggttacccgtggacgttcggtggaggcaccaagctggaaatcaaa

SEQ ID NO: 213 - protein, 108 aa, Mus musculus
ENVLTQSPAIMAASLGQKVTMTCSASSSVSSSYLHWYQQKSGASPKPLIHRTSNLASGVPARFSGSGSGTSYSLTISSVEAEDDATYYCRQWSGYPWTFGGGTKLEIK

SEQ ID NO: 214 - DNA, 357 bp, Mus musculus
  misc_feature (1)..(357): SC16.88 VH
  CDS (1)..(357)
caggttcagctgcagcagtctggggctgagctggcaagacctggggcttcagtgaagttgtcctgcaaggcttctggctacacctgtactagctactggatgcagtgggtaaaacagaggcctggacagggtctggaatggattggggctatttatcctggagatggtgatactaggtacactcagaagttcaagggcaaggccacattgactgcagataaatcctccagcacagcctacatgcaactcagcagcttggcatctgaggactctgcggtctattactgtgcaagggggaggcggacggaggcctggtttgcttactggggccaagggactctggtcactgtctctgca

SEQ ID NO: 215 - protein, 119 aa, Mus musculus
QVQLQQSGAELARPGASVKLSCKASGYTCTSYWMQWVKQRPGQGLEWIGAIYPGDGDTRYTQKFKGKATLTADKSSSTAYMQLSSLASEDSAVYYCARGRRTEAWFAYWGQGTLVTVSA

SEQ ID NO: 216 - DNA, 324 bp, Mus musculus
  misc_feature (1)..(324): SC16.101 VL
  CDS (1)..(324)
caaattgttctcacccagtctccagcaatcatgtctgcatctctaggggaacgggtcaccatgacctgcactgccagctcaagtgtaagttccagttacttgcactggtaccagcagaagccaggatcctcccccaaactctggatttatagcacatccaacctggcttctggagtcccagctcgcttcagtggcagtgagtctgggacctcttactctctcacaatcagcaacatggaggctgaggatgctgccacttattactgccaccagtatcatcgttccccattcacgttcggctcggggacaaagttggaaataaaa

SEQ ID NO: 217 - protein, 108 aa, Mus musculus
QIVLTQSPAIMSASLGERVTMTCTASSSVSSSYLHWYQQKPGSSPKLWIYSTSNLASGVPARFSGSESGTSYSLTISNMEAEDAATYYCHQYHRSPFTFGSGTKLEIK

SEQ ID NO: 218 - DNA, 360 bp, Mus musculus
  misc_feature (1)..(360): SC16.101 VH
  CDS (1)..(360)
caggttactctgaaagagtctggccctgggatattgcagccctcccagaccctcagtctgacttgttctttctctggattttcactgagcacttctggtatgggcgtaggctggattcgtcagccatcagggaagggtctggagtggctggcacacatttggtgggatgatgtcaagcgctataacccagcccttaagagccgactgactatctccaaggatgcctccagcagccaggtattcctcaagatcgccagtgtggacactgcagaaactgccacatactactgtgcccacatcctcgaccgggcttactactttgactactggggccaaggcaccactctcacagtcacctca

SEQ ID NO: 219 - protein, 120 aa, Mus musculus
QVTLKESGPGILQPSQTLSLTCSFSGFSLSTSGMGVGWIRQPSGKGLEWLAHIWWDDVKRYNPALKSRLTISKDASSSQVFLKIASVDTAETATYYCAHILDRAYYFDYWGQGTTLTVTS

SEQ ID NO: 220 - DNA, 333 bp, Mus musculus
  misc_feature (1)..(333): SC16.103 VL
  CDS (1)..(333)
gacattgtgctgacacagtctcctgcttccttagctgtatctctggggcagagggccaccatctcatgcagggccagcaaaagtgtcagtacatctggctatagttatatgcactggtaccaacagaaaccaggacagccacccaaactcctcatctatcttgcatccaacctagaatctggggtccctgccaggttcagtggcagtgggtctgggacagacttcaccctcaacatccatcctgtggaggaggaggatgctgcaacctattactgtcagcacagtagggagcttcctctcacgttcggtgctgggaccaagctggagctgaaa

SEQ ID NO: 221 - protein, 111 aa, Mus musculus
DIVLTQSPASLAVSLGQRATISCRASKSVSTSGYSYMHWYQQKPGQPPKLLIYLASNLESGVPARFSGSGSGTDFTLNIHPVEEEDAATYYCQHSRELPLTFGAGTKLELK

SEQ ID NO: 222 - DNA, 357 bp, Mus musculus
  misc_feature (1)..(357): SC16.103 VH
  CDS (1)..(357)
caagttactctaaaagagtctggccctgggatattgaagccctcacagaccctcagtctgacttgttctttctctgggttttcactgagcacttctggtatgggtataggctggattcgtcagccttcagggaagggtctggagtggctggcacacatttggtgggatgatgataagtactataacccatccctgaagagccagctcacaatctccaaggattcctccagaaaccaggttttcctcaagatcaccagtgtggacactgcagatactgccacttactactgtgctcgaagagggactgcgtactactttgactactggggccaaggcaccactctcacagtctcctca

SEQ ID NO: 223 - protein, 119 aa, Mus musculus
QVTLKESGPGILKPSQTLSLTCSFSGFSLSTSGMGIGWIRQPSGKGLEWLAHIWWDDDKYYNPSLKSQLTISKDSSRNQVFLKITSVDTADTATYYCARRGTAYYFDYWGQGTTLTVSS

SEQ ID NO: 224 - DNA, 318 bp, Mus musculus
  misc_feature (1)..(318): SC16.104 VL
  CDS (1)..(318)
caaattgttctctcccagtctccagcaatcctgtctgcatctccaggggagaaggtcacaatgacttgcagggccagttcaagtgtaagttacattcactggtaccggcagaagccaggatcctcccccaaaccctggatttatgccacatccaacctggcttctggagtccctgctcgcttcagtggcagtgggtctgggacctcttactctctcacaatcagcagagtggaggctgaagatgctgccacttattactgccagcagtggagcagtaatccacccacgttcggtgctgggaccaagctggagctgaaa

SEQ ID NO: 225 - protein, 106 aa, Mus musculus
QIVLSQSPAILSASPGEKVTMTCRASSSVSYIHWYRQKPGSSPKPWIYATSNLASGVPARFSGSGSGTSYSLTISRVEAEDAATYYCQQWSSNPPTFGAGTKLELK

SEQ ID NO: 226 - DNA, 345 bp, Mus musculus
  misc_feature (1)..(345): SC16.104 VH
  CDS (1)..(345)
caggtgcagctgaaggagtcaggacctgaccttgtgcagccctcacagaccctgtctctcacctgcactgtctctgggttctcattaaccttctatggtgttcactgggttcgccagcctccaggaaagggactggagtgggtgggaacaatgggctgggatgacaaaaaatattataattcagctctaaaatctcgactgagcatcagcagggatacctccaagaaccaggttttcttaaaactgagcagtctgcaaactgaagacacagccatgtactactgtactagaggtgggacggggtttgactactggggccaaggcaccactctcacagtctcctca

SEQ ID NO: 227 - protein, 115 aa, Mus musculus
QVQLKESGPDLVQPSQTLSLTCTVSGFSLTFYGVHWVRQPPGKGLEWVGTMGWDDKKYYNSALKSRLSISRDTSKNQVFLKLSSLQTEDTAMYYCTRGGTGFDYWGQGTTLTVSS

SEQ ID NO: 228 - DNA, 321 bp, Mus musculus
  misc_feature (1)..(321): SC16.105 VL
  CDS (1)..(321)
gacattgtgatgacccagtcgcacaaattcatgtccacatcagtaggagacagggtcagcatcacctgcaaggccagtcaggatgtgggtactgctgtagcctggtatcaacagaaaccagggcaatctcctaaactactgatttactgggcatccatccggcacactggagtccctgatcgcttcacaggcagtggatctgggacagatttcactctcaccattagcaatgtgcagtctgaagacttggcagattatttctgtcagcaatatagcagctatccgctcacgttcggtgctgggaccaagctggagctgaaa

SEQ ID NO: 229 - protein, 107 aa, Mus musculus
DIVMTQSHKFMSTSVGDRVSITCKASQDVGTAVAWYQQKPGQSPKLLIYWASIRHTGVPDRFTGSGSGTDFTLTISNVQSEDLADYFCQQYSSYPLTFGAGTKLELK

SEQ ID NO: 230 - DNA, 363 bp, Mus musculus
  misc_feature (1)..(363): SC16.105 VH
  CDS (1)..(363)
caggtccaactgcagcagcctggggctgagcttgtgaagcctggggcttcagtgaagctgtcctgcaaggcttctggctacaccttcaccagctactggatgcactgggtgaagcagaggcctggacaaggccttgagtggattggagtgattaatcctagcaacggtcgtactaactacaatgagaagttcaagagcaaggccacactgactgtagacaaatcctccagcacagcctacatgcaactcagcagcctgacatctgaggactctgcggtctattactgtgcaagaagaagggaactgggaaccctctatgctatggactactggggtcaaggaacctcagtcaccgtctcctca

SEQ ID NO: 231 - protein, 121 aa, Mus musculus
QVQLQQPGAELVKPGASVKLSCKASGYTFTSYWMHWVKQRPGQGLEWIGVINPSNGRTNYNEKFKSKATLTVDKSSSTAYMQLSSLTSEDSAVYYCARRRELGTLYAMDYWGQGTSVTVSS

SEQ ID NO: 232 - DNA, 321 bp, Mus musculus
  misc_feature (1)..(321): SC16.106 VL
  CDS (1)..(321)
gacatcaagatgacccagtctccatcttccatgtatgcatctctaggagagagagtcactatcacttgcaaggcgagtcaggacattaatagctatttaagctggttccagcagaaaccagggaaatctcctaagaccctgatctatcgtgcaaacagattggtagatggggtcccatcaaggttcagtggcagtggatctgggcaagattattctctcaccatcagcagcctggagtatgaagatatgggaatttattattgtctacagtatgatgagtttccattcacgttcggctcggggacaaagttggaaataaaa

SEQ ID NO: 233 - protein, 107 aa, Mus musculus
DIKMTQSPSSMYASLGERVTITCKASQDINSYLSWFQQKPGKSPKTLIYRANRLVDGVPSRFSGSGSGQDYSLTISSLEYEDMGIYYCLQYDEFPFTFGSGTKLEIK

SEQ ID NO: 234 - DNA, 345 bp, Mus musculus
  misc_feature (1)..(345): SC16.106 VH
  CDS (1)..(345)
caggtgcaactgaagcagtcaggacctggcctggtggcgccctcacagagcctgttcatcacatgcaccgtctcagggttctcattaaccagctatgaaataaactgggttcgccagcctccaggaaagggtctggagtggctgggagtgatatggactggtggaagcacaaattataattcagctctcatatccagactgagcatcagcaaagacaactccaagagcctagttttcttaaaaatgaacagtctgcaaactgatgacacagccatatattactgtgtaagaggtgtttatgctatggactactggggtcaaggaacctcagtcaccgtctcctca

SEQ ID NO: 235 - protein, 115 aa, Mus musculus
QVQLKQSGPGLVAPSQSLFITCTVSGFSLTSYEINWVRQPPGKGLEWLGVIWTGGSTNYNSALISRLSISKDNSKSLVFLKMNSLQTDDTAIYYCVRGVYAMDYWGQGTSVTVSS

SEQ ID NO: 236 - DNA, 321 bp, Mus musculus
  misc_feature (1)..(321): SC16.107 VL
  CDS (1)..(321)
gacattgtgatgacccagtctcacaaattcatgtccacatcagtaggagacagggtcagcatcacctgcaaggccagtcaggatgtgaatactgctgtaggctggtatcaacagaaaccaggacaatctcctaaactactgatttactcggcatcctaccggtacactggagtccctgatcgcttcactggcagtggatctgggacggatttcactttcaccatcagcagtgtgcaggctgaagacctggcagtttattactgtcagcaacattatagtagtccgtacacgttcggaggggggaccaaggtggaaataaaa

SEQ ID NO: 237 - protein, 107 aa, Mus musculus
DIVMTQSHKFMSTSVGDRVSITCKASQDVNTAVGWYQQKPGQSPKLLIYSASYRYTGVPDRFTGSGSGTDFTFTISSVQAEDLAVYYCQQHYSSPYTFGGGTKVEIK

SEQ ID NO: 238 - DNA, 357 bp, Mus musculus
  misc_feature (1)..(357): SC16.107 VH
  CDS (1)..(357)
gaggtccagctgcagcagtctggacctgagctggtaaagcctggggcttcagtgaagatgtcctgcaaggcttctggatacacattcactaactatgttatgcactgggtgaagcagaagcctgggcagggccttgagtggattggatatattaatccttacaatgatggtactaaatacaatgagaagttcaaaggcaaggccacactgacttcagacaaatcctccaccacagcctacatggcgctcagcagcctgacctctgaggactctgcggtctattactgtgcagtagcctactatagtaactgggggtttgcttactggggccaagggactctggtcactgtctctgca

SEQ ID NO: 239 - protein, 119 aa, Mus musculus
EVQLQQSGPELVKPGASVKMSCKASGYTFTNYVMHWVKQKPGQGLEWIGYINPYNDGTKYNEKFKGKATLTSDKSSTTAYMALSSLTSEDSAVYYCAVAYYSNWGFAYWGQGTLVTVSA

SEQ ID NO: 240 - DNA, 321 bp, Mus musculus
  misc_feature (1)..(321): SC16.108 VL
  CDS (1)..(321)
gacatccagatgactcagtctccagcctccctatctgcatctgtgggagaaactgtcaccatcacatgtcgagcaagtgagaatatttacagttatttagcatggtatcagcagaaacagggaaaatctcctcagctcctggtctataatgcaaaaaccttagcagaaggtgtgccatcaaggttcagtggcagtagatcaggctcacagttttctctgaagatcaacagcctgcagcctgaagattttgggagttattactgtcaacatcattatggtactccgtacacgttcggaggggggaccaagctggaaataaaa

SEQ ID NO: 241 - protein, 107 aa, Mus musculus
DIQMTQSPASLSASVGETVTITCRASENIYSYLAWYQQKQGKSPQLLVYNAKTLAEGVPSRFSGSRSGSQFSLKINSLQPEDFGSYYCQHHYGTPYTFGGGTKLEIK

SEQ ID NO: 242 - DNA, 360 bp, Mus musculus
  misc_feature (1)..(360): SC16.108 VH
  CDS (1)..(360)
caggttcagctggaggagtcaggggctgagctggcaagacctggggcttcagtgaagttgtcctgcaaggcttctggctatagctactggatgcagtggataaaacagaggcctggacagggtctggaatggattggggctatttatcctggaaatggtgatactaggtacactcagaagttcaagggcaaggccacattgactgcagataaatcctccagcacagcctacatgcaactcagcagcttggcatctgaggactctgcggtctattactgtgcaagatctccggcctactataggtacggcgagggctactttgactactggggccaaggcaccactctcacagtctcctca

SEQ ID NO: 243 - protein, 120 aa, Mus musculus
QVQLEESGAELARPGASVKLSCKASGYSYWMQWIKQRPGQGLEWIGAIYPGNGDTRYTQKFKGKATLTADKSSSTAYMQLSSLASEDSAVYYCARSPAYYRYGEGYFDYWGQGTTLTVSS

SEQ ID NO: 244 - DNA, 318 bp, Mus musculus
  misc_feature (1)..(318): SC16.109 VL
  CDS (1)..(318)
caaattgttctcacccagtctccagcaatcatgtctgcatctccaggggagaaggtcaccatgacctgcagtgccagctcaagtgtaagttacatgtactggtaccagcagaagccaggatcctcccccagactcctgatttatgacacatccaacctggcttctggagtccctgttcgcttcagtggcagtgggtctgggacctctttctctctcacaatcagccgaatggaggctgaagatactgccacttattactgccaggagtggagtggtaatccgctcacgttcggtgatgggaccaagctggagctgaaa

SEQ ID NO: 245 - protein, 106 aa, Mus musculus
QIVLTQSPAIMSASPGEKVTMTCSASSSVSYMYWYQQKPGSSPRLLIYDTSNLASGVPVRFSGSGSGTSFSLTISRMEAEDTATYYCQEWSGNPLTFGDGTKLELK

SEQ ID NO: 246 - DNA, 354 bp, Mus musculus
  misc_feature (1)..(354): SC16.109 VH
  CDS (1)..(354)
cagatccagttggtgcagtctggacctgagctgaagaagcctggagagacagtcaagatctcctgcaaggcttctgggtataccttcacaaactatggaatgaactgggtgaagcaggctccaggaaagggtttaaagtggatgggctggataaacacctacactggagagccagcatatgctgatgacttcaagggacggtttgccttctctttggaaacctctgccagcgctgcctatttgcagatcaacaacctcaaaaatgaggacacggctacttttttctgtgcaaatatgaggcccacgagggggtttgcttactgggggcaagggactctgggcactgtctctgca

SEQ ID NO: 247 - protein, 118 aa, Mus musculus
QIQLVQSGPELKKPGETVKISCKASGYTFTNYGMNWVKQAPGKGLKWMGWINTYTGEPAYADDFKGRFAFSLETSASAAYLQINNLKNEDTATFFCANMRPTRGFAYWGQGTLGTVSA

SEQ ID NO: 248 - DNA, 321 bp, Mus musculus
  misc_feature (1)..(321): SC16.110 VL
  CDS (1)..(321)
aatattgtgatgacccagactcccaaattcctgcttgtatcagcaggagacagggttaccataacctgcaaggccagtcagagtgtgagtaatgatgtagcttggtaccaacagaagccagggcagtctcctaaactgctgatatactatgcatccaatcgctacactggagtccctgatcgcttcactggcagtggatatgggacggatttcactttcaccatcagcactgtgcaggctgaagacctggcagtttatttctgtcagcaggattatagctctcctccgacgttcggtggaggcaccaagctggaaatcaaa

SEQ ID NO: 249 - protein, 107 aa, Mus musculus
NIVMTQTPKFLLVSAGDRVTITCKASQSVSNDVAWYQQKPGQSPKLLIYYASNRYTGVPDRFTGSGYGTDFTFTISTVQAEDLAVYFCQQDYSSPPTFGGGTKLEIK

SEQ ID NO: 250 - DNA, 354 bp, Mus musculus
  misc_feature (1)..(354): SC16.110 VH
  CDS (1)..(354)
gaggtccagctgcagcagtctggacctgggctagtgaggactggggcttcagtgaagatatcctgcaaggcttctggttactcattcactggttactacatgcactgggtcaagcagagccatggaaagagccttgagtggattggatatattagttgttacaatggtgctactacctacaaccagaacttcaagggcaaggccacatttattgtagacacatcctccagcacagcctacatgcagttcaacagcctgacatctgaggactctgcggtctattactgtgcaagatccgacggggggcatgctatggactactggggtcaaggaacctcagtcaccgtctcctca

SEQ ID NO: 251 - protein, 118 aa, Mus musculus
EVQLQQSGPGLVRTGASVKISCKASGYSFTGYYMHWVKQSHGKSLEWIGYISCYNGATTYNQNFKGKATFIVDTSSSTAYMQFNSLTSEDSAVYYCARSDGGHAMDYWGQGTSVTVSS

SEQ ID NO: 252 - DNA, 321 bp, Mus musculus
  misc_feature (1)..(321): SC16.111 VL
  CDS (1)..(321)
gacatccagatgactcagtctccagcctccctggctgcatctgtgggagaaactgtcaccatcacatgtcgagcaagtgagaacatttactacagtttagcatggtatcagcagaagcaagggaaatctcctcagctcctgatctataatgcaaacagcttggaagatggtgtcccatcgaggttcagtggcagtggatctgggacacagtattctatgaagatcaacagcatgcagcctgaagataccgcaacttatttctgtaagcagacttatgacgttccgctcacgttcggtgctgggaccaagctggagctgaaa

SEQ ID NO: 253 - protein, 107 aa, Mus musculus
DIQMTQSPASLAASVGETVTITCRASENIYYSLAWYQQKQGKSPQLLIYNANSLEDGVPSRFSGSGSGTQYSMKINSMQPEDTATYFCKQTYDVPLTFGAGTKLELK

SEQ ID NO: 254 - DNA, 351 bp, Mus musculus
  misc_feature (1)..(351): SC16.111 VH
  CDS (1)..(351)
gaggttcagctgcagcagtctggacctgagctggagaagcctggcgcttcagtgaagatatcctgcaaggcttctggttactcattcactggctacaacatgaactgggtgaagcagagcaatggaaagagccttgagtggattggaaatattgatccttattatggtggttctagctacaaacagaagttcgagggcaaggccacattgactgtagacaaatcctccagcacagcctacatgcagctcaagagcctgacatctgaggactctgcagtctattactgtgcaagaggtggtagtaacttctttgactactggggccaaggcaccactctcacagtctcctca

SEQ ID NO: 255 - protein, 117 aa, Mus musculus
EVQLQQSGPELEKPGASVKISCKASGYSFTGYNMNWVKQSNGKSLEWIGNIDPYYGGSSYKQKFEGKATLTVDKSSSTAYMQLKSLTSEDSAVYYCARGGSNFFDYWGQGTTLTVSS

SEQ ID NO: 256 - DNA, 336 bp, Mus musculus
  misc_feature (1)..(336): SC16.113 VL
  CDS (1)..(336)
gatgttgtgatgacccagactccactcactttgtcggttaccattggacaaccagcctccatctcttgcaagtcaagtcagagcctcttagatagtgatggaacgacatatttgaattggttgttacagaggccaggccagtctccaaagcgcctaatctatctggtgtctaaactggactctggagtccctgacaggttcactggcagtggatcagggacagatttcacactgaaaatcagcagagtggaggctgaggatttgggagtttattattgctggcaaggtacacattttccgctcacgttcggtgctgggaccaagctggagctgaaa

SEQ ID NO: 257 - protein, 112 aa, Mus musculus
DVVMTQTPLTLSVTIGQPASISCKSSQSLLDSDGTTYLNWLLQRPGQSPKRLIYLVSKLDSGVPDRFTGSGSGTDFTLKISRVEAEDLGVYYCWQGTHFPLTFGAGTKLELK

SEQ ID NO: 258 - DNA, 351 bp, Mus musculus
  misc_feature (1)..(351): SC16.113 VH
  CDS (1)..(351)
gacgtgaagctggtggagtctgggggaggcttagtgaagcctggagggtccctgaaactctcctgtgcagcctctggattcactttcagtagctataccatgtcttgggttcgccagactccggagaagaggctggagtgggtcgcaaccattagtagtggtggtagttacccctactatccagacagtgtgaagggccgattcaccatctccagagacaatgccaagaacaccctgtacctgcaaatgagcagtctgaagtctgaggacacagccatgtattactgtacaagagatgtctatgatggttactcctactggggccaaggcaccactctcacagtctcctca

SEQ ID NO: 259 - protein, 117 aa, Mus musculus
DVKLVESGGGLVKPGGSLKLSCAASGFTFSSYTMSWVRQTPEKRLEWVATISSGGSYPYYPDSVKGRFTISRDNAKNTLYLQMSSLKSEDTAMYYCTRDVYDGYSYWGQGTTLTVSS

SEQ ID NO: 260 - DNA, 318 bp, Mus musculus
  misc_feature (1)..(318): SC16.114 VL
  CDS (1)..(318)
caaattgttctctcccagtctccagcaatcctgtctgcatctccaggggagaaggtcacaatgacttgcagggccagctcaagtgtaagttacatgcactggtaccagcagaagccaggatcctcccccaaaccctggatttatgccacatccaacctggcttctggagtccctgctcgcttcagtggcagtgggtctgggacctcttactctctcacaatcagcagagtggaggctgaagatgctgccacttattactgccagcagtggagtagtaacccatacacgttcggaggggggaccaagctggaaataaaa

SEQ ID NO: 261 - protein, 106 aa, Mus musculus
QIVLSQSPAILSASPGEKVTMTCRASSSVSYMHWYQQKPGSSPKPWIYATSNLASGVPARFSGSGSGTSYSLTISRVEAEDAATYYCQQWSSNPYTFGGGTKLEIK

SEQ ID NO: 262 - DNA, 369 bp, Mus musculus
  misc_feature (1)..(369): SC16.114 VH
  CDS (1)..(369)
gaggttcagctgcagcagtctggggcagaacttgtgaagccaggggcctcagtcaaattgtcctgcacagcttctggcttcaacattaaagacacctatatacactgggtgaaacagaggcctgaacagggcctggagtggattggaaggattgatcctgcgaatggtaatactaaatatgacccgaagttccagggcaaggccactataacaccagacacatcctccaacacagcctacctgcagctcagcagcctgacatctgaggacactgccgtctattactgtgctagaagctggcgaaactacggtagtagtttctggtacttcgatgtctggggcgcagggaccacggtcaccgtctcctca

SEQ ID NO: 263 - protein, 123 aa, Mus musculus
EVQLQQSGAELVKPGASVKLSCTASGFNIKDTYIHWVKQRPEQGLEWIGRIDPANGNTKYDPKFQGKATITPDTSSNTAYLQLSSLTSEDTAVYYCARSWRNYGSSFWYFDVWGAGTTVTVSS

SEQ ID NO: 264 - DNA, 336 bp, Mus musculus; identical to SEQ ID NO: 256
  misc_feature (1)..(336): SC16.115 VL
  CDS (1)..(336)

SEQ ID NO: 265 - protein, 112 aa, Mus musculus; identical to SEQ ID NO: 257

SEQ ID NO: 266 - DNA, 351 bp, Mus musculus; identical to SEQ ID NO: 258
  misc_feature (1)..(351): SC16.115 VH
  CDS (1)..(351)

SEQ ID NO: 267 - protein, 117 aa, Mus musculus; identical to SEQ ID NO: 259

SEQ ID NO: 268 - DNA, 333 bp, Mus musculus
  misc_feature (1)..(333): SC16.116 VL
  CDS (1)..(333)
gacattgtgatgacacagtctccatcctccctgactgtgacagcaggagagaaggtcactatgagctgcacgtccagtcagagtctgttaaccagtggaaatcaaaagaactacttgacctggtaccagcagaaaccagggcagcctcctaaactgttgatctactgggcatccactagggaatctggggtccctgatcgcttcacaggcagtggatctggaacagatttcactctcaccatcagcagtttgcaggctgaagacctggcagtttattactgtcagaatgattatagtctcacgttcggtgctgggaccaagctggagctgaaa

SEQ ID NO: 269 - protein, 111 aa, Mus musculus
DIVMTQSPSSLTVTAGEKVTMSCTSSQSLLTSGNQKNYLTWYQQKPGQPPKLLIYWASTRESGVPDRFTGSGSGTDFTLTISSLQAEDLAVYYCQNDYSLTFGAGTKLELK

SEQ ID NO: 270 - DNA, 354 bp, Mus musculus
  misc_feature (1)..(354): SC16.116 VH
  CDS (1)..(354)
caggtgcagctgaagcagtcaggacctggccgagtgcagccctcacagagcctgtccatcacctgcacagtctctggtttttcattaactagcaatggtgtacactgggttcgccagtctccaggaaagggtctggagtggctgggagtgctatggagtggtggaagcacagactataatgcagctttcatatccagactgagcatcagcaaggacaattacaagagccaagttttctttaaaatgaacagtctgcaagctaatgacacagccatatattactgtgccagaaataataataggtacggagctatggactactggggtcaaggaacctcagtcaccgtctcctca

SEQ ID NO: 271 - protein, 118 aa, Mus musculus
QVQLKQSGPGRVQPSQSLSITCTVSGFSLTSNGVHWVRQSPGKGLEWLGVLWSGGSTDYNAAFISRLSISKDNYKSQVFFKMNSLQANDTAIYYCARNNNRYGAMDYWGQGTSVTVSS

SEQ ID NO: 272 - DNA, 321 bp, Mus musculus
  misc_feature (1)..(321): SC16.117 VL
  CDS (1)..(321)
gacatccagatgaaccagtctccatccagtctgtctgcatcccttggagacacaattaccatcacttgccatgtcagtcagaacattaatgtttggttaagctggtaccagcagaaaccaggaaatattcctaaactattgatccaaaaggcttccaacttgcacacaggcgtcccctcaaggtttagtggcagtggatctggaacaggtttcacattaaccatcagcagcctgcagcctgaagacattgccacttactactgtcaacagggtcaaagttatccattcacgttcggctcggggacaaagttggaaataaaa

SEQ ID NO: 273 - protein, 107 aa, Mus musculus
DIQMNQSPSSLSASLGDTITITCHVSQNINVWLSWYQQKPGNIPKLLIQKASNLHTGVPSRFSGSGSGTGFTLTISSLQPEDIATYYCQQGQSYPFTFGSGTKLEIK

SEQ ID NO: 274 - DNA, 351 bp, Mus musculus
  misc_feature (1)..(351): SC16.117 VH
  CDS (1)..(351)
caggtgcagctgaaggagtcaggacctggcctggtggcgccctcacagagcctgtccatcacttgcactgtctctgggttttcattaaccaactatggtgtacactgggttcgccagcctccaggaaagggtctggagtggctgggagtaatatgggctggtggaatcacaaattataattcggctctcatgtccagactgagcatcagcgaagacaactccaagagccaagttttcttaaaaatgaacagtctgcaaactgatgacacagccatgtactactgtgccagaaatttaggtccctatgctatggactactggggtcaaggaacctcagtcaccgtctcctca

SEQ ID NO: 275 - protein, 117 aa, Mus musculus
QVQLKESGPGLVAPSQSLSITCTVSGFSLTNYGVHWVRQPPGKGLEWLGVIWAGGITNYNSALMSRLSISEDNSKSQVFLKMNSLQTDDTAMYYCARNLGPYAMDYWGQGTSVTVSS

SEQ ID NO: 276 - DNA, 333 bp, Mus musculus
  misc_feature (1)..(333): SC16.118 VL
  CDS (1)..(333)
gacattgtgctgacccaatctccagcttctttggctgtgtctctagggcagagggccaccatctcctgcaaggccagccaaagtgttgattatgatggtgatagttatttgacctggtaccaacagaaaccaggacagccacccaaactcctcatctatgctgcatccaatctagaatctgggatcccagccaggtttagtggcagtgggtctgggacagacttcaccctcaacatccatcctgtggaggaggaggacgctgcaacctattactgtcagcaaagtaatgaggatccgtacacgttcggaggggggaccaagctggaaataaaa

SEQ ID NO: 277 - protein, 111 aa, Mus musculus
DIVLTQSPASLAVSLGQRATISCKASQSVDYDGDSYLTWYQQKPGQPPKLLIYAASNLESGIPARFSGSGSGTDFTLNIHPVEEEDAATYYCQQSNEDPYTFGGGTKLEIK

SEQ ID NO: 278 - DNA, 351 bp, Mus musculus
  misc_feature (1)..(351): SC16.118 VH
  CDS (1)..(351)
gaggtccagctgcagcagtctggacctgacctggtgaagcctggggcttcagtgaagatatcctgcaaggcttctggttactcattcactggctactacatgcactgggtgaagcagagccatggaaagagccttgagtggattggacgtgttaatcctaacaatggtggtactagctacaaccagaagttcaagggcaaggccatattaactgcagacaagtcatccagcacagcctacatggagctccgcagcctgacatctgaggactctgcggtctattactgtgcaagagggagttatgattacgccgagggctggggccaagggactctggtcactgtctctgca

SEQ ID NO: 279 - protein, 117 aa, Mus musculus
EVQLQQSGPDLVKPGASVKISCKASGYSFTGYYMHWVKQSHGKSLEWIGRVNPNNGGTSYNQKFKGKAILTADKSSSTAYMELRSLTSEDSAVYYCARGSYDYAEGWGQGTLVTVSA

SEQ ID NO: 280 - DNA, 339 bp, Mus musculus
  misc_feature (1)..(339): SC16.120 VL
  CDS (1)..(339)
gacattgtgatgtcacagtctccatcctccctagctgtgtcagttggagagaaggttactatgagctgcaagtccagtcagagccttttatatagtagcactcaaaagaactacttggcctggtaccagcagaaaccagggcagtctcctaaactgctgatttactgggcatccactagggaatctggggtccctgatcgcttcacaggcagtggatctgggacagatttcactctcaccatcagcagtgtgaaggctgaagacctggcagtttattactgtcagcaatattatagctatccgtacacgttcggaggggggaccaagctggaaataaaa

SEQ ID NO: 281 - protein, 113 aa, Mus musculus
DIVMSQSPSSLAVSVGEKVTMSCKSSQSLLYSSTQKNYLAWYQQKPGQSPKLLIYWASTRESGVPDRFTGSGSGTDFTLTISSVKAEDLAVYYCQQYYSYPYTFGGGTKLEIK

SEQ ID NO: 282 - DNA, 351 bp, Mus musculus
  misc_feature (1)..(351): SC16.120 VH
  CDS (1)..(351)
gagatccagctgcagcagtctggacctgagctggtgaagcctggggcttcagtgaaggtatcctgcaaggcttctggttatgcattcactagctacaacatgtactgggtgatgcagagccatggaaagagccttgagtggattggatatgttgatccttacaatggtggtactagctacaaccagaagttcaagggcaaggccacattgactgttgacaagtcctccagcacagcctacatgcatctcaacagcctgacatctgaggactctgcagtctattactgtgcaagagaaaactataggtactttgactactggggccaaggcaccactctcacagtctcctca

SEQ ID NO: 283 - protein, 117 aa, Mus musculus
EIQLQQSGPELVKPGASVKVSCKASGYAFTSYNMYWVMQSHGKSLEWIGYVDPYNGGTSYNQKFKGKATLTVDKSSSTAYMHLNSLTSEDSAVYYCARENYRYFDYWGQGTTLTVSS

SEQ ID NO: 284 - DNA, 318 bp, Mus musculus
  misc_feature (1)..(318): SC16.121 VL
  CDS (1)..(318)
caaattgttctcacccagtctccagcaatcatgtctgcatctccaggggagaaggtcaccataacctgcagtgccagctcaagtgtaagttacatgcactggttccagcagaagccaggcacttctcccaaactctggatttatagcacatccaacctggcttctggagtccctgctcgcttcagtggcagtggatctgggacctcttactctctcacaatcagccgaatggaggctgaagatgctgccacttattactgccagcaaaggagtagttacccacccacgttcggaggggggaccaagctggaaataaar

SEQ ID NO: 285 - protein, 106 aa, Mus musculus
QIVLTQSPAIMSASPGEKVTITCSASSSVSYMHWFQQKPGTSPKLWIYSTSNLASGVPARFSGSGSGTSYSLTISRMEAEDAATYYCQQRSSYPPTFGGGTKLEIK

SEQ ID NO: 286 - DNA, 372 bp, Mus musculus
  misc_feature (1)..(372): SC16.121 VH
  CDS (1)..(372)
gaggtgcagcttgttgagtctggtggaggattggtgcagcctaaagggtcattgaaactctcatgtgcagcctctggattcaccttcaatacctacgccatgaactgggtccgccaggctccaggaaagggtttggaatgggttgctcgcataagaattaaaagtaataattatgcaacatattatgccgattcagtaaaagacaggttcaccatctccagagatgattcacaaaacatgctctatctgcaaatgaacaacttgaaaactgaggacacagccgtgtattactgtgtgagacaaggctatagttacgactggggaccctggtttgcttactggggccaagggactctggtcactgtctctgca

SEQ ID NO: 287 - protein, 124 aa, Mus musculus
EVQLVESGGGLVQPKGSLKLSCAASGFTFNTYAMNWVRQAPGKGLEWVARIRIKSNNYATYYADSVKDRFTISRDDSQNMLYLQMNNLKTEDTAVYYCVRQGYSYDWGPWFAYWGQGTLVTVSA

SEQ ID NO: 288 - DNA, 321 bp, Mus musculus
  misc_feature (1)..(321): SC16.122 VL
  CDS (1)..(321)
gacattgtgatgacccagtctcaaaaattcatgtccacatcagtaggagacagggtcagcgtcacctgcaaggccagtcagaatgtgggtactaatgtagcctggtatcaacagaaaccagggcaatctcctaaagtactgatttactcggcatcctaccggtacagtggagtccctgatcgcttcacaggcagtggatctgggacagatttcactctcaccatcagcaatgtgcagtctgaagacttggcagagtttttctgtcagcaatataacagctatcctctgacgttcggtggaggcaccaagctggaaatcaaa

SEQ ID NO: 289 - protein, 107 aa, Mus musculus
DIVMTQSQKFMSTSVGDRVSVTCKASQNVGTNVAWYQQKPGQSPKVLIYSASYRYSGVPDRFTGSGSGTDFTLTISNVQSEDLAEFFCQQYNSYPLTFGGGTKLEIK

SEQ ID NO: 290 - DNA, 354 bp, Mus musculus
  misc_feature (1)..(354): SC16.122 VH
  CDS (1)..(354)
gaagtgcagctggtggagtctgggggaggcttagtgaagcctggagggtccctgaaactctcctgtgcagcctctggattcactttcagtgactattacatgttttgggttcgccagactccggaaaagaggctggagtgggtcgcaaccattagtgatggtggtagttacacctactttccagacagtgtgaaggggcgattcaccatctccagagacaatgcccagaacaacctgtacctgcaaatgagcagtctgaagtctgaggacacagccatgtattactgtgcaagagccgggaccctctatgctatggactactggggtcaaggaacctcagtcaccgtctcctca

SEQ ID NO: 291 - protein, 118 aa, Mus musculus
EVQLVESGGGLVKPGGSLKLSCAASGFTFSDYYMFWVRQTPEKRLEWVATISDGGSYTYFPDSVKGRFTISRDNAQNNLYLQMSSLKSEDTAMYYCARAGTLYAMDYWGQGTSVTVSS

SEQ ID NO: 292 - DNA, 324 bp, Mus musculus
  misc_feature (1)..(324): SC16.123 VL
  CDS (1)..(324)
caaattgttctcacccagtctccagcaatcatgtctgcatctctaggggaacgggtcaccatgacctgcactgccagctcaagtgtaagttccagttacttgcactggtaccagcagaagccaggatcctcccccaaactctggatttatagcacatccaacctggcttctggagtcccagctcgcttcagtggcagtgggtctgggacctcttactctctcacaatcagcagcatggagactgaagatgctgccacttattactgccaccagtatcatcgttcccccttcacgttcggctcggggacaaagttggaaataaaa

SEQ ID NO: 293 - protein, 108 aa, Mus musculus
QIVLTQSPAIMSASLGERVTMTCTASSSVSSSYLHWYQQKPGSSPKLWIYSTSNLASGVPARFSGSGSGTSYSLTISSMETEDAATYYCHQYHRSPFTFGSGTKLEIK

SEQ ID NO: 294 - DNA, 366 bp, Mus musculus
  misc_feature (1)..(366): SC16.123 VH
  CDS (1)..(366)
caggttgctctgaaagagtctggccctgggatattgcagccctcccagaccctcagtctgacttgttctttctctgggttttcactgagcacttctggtatgggtgtaggctggattcgtcagccatcagggaagggtctggagtggctggcacacatttggtgggatgatgtcaagcgctataacccagccctgaagagccgactgactatctccaaggatacctccagcagccaggtattcctcaagatcgccagtgtggacactgcagatactgccacatactactgtgctcgaatggaggactacggtagtagctcctactttgacttctggggccacggcaccactctcacagtctcctca

SEQ ID NO: 295 - protein, 122 aa, Mus musculus
QVALKESGPGILQPSQTLSLTCSFSGFSLSTSGMGVGWIRQPSGKGLEWLAHIWWDDVKRYNPALKSRLTISKDTSSSQVFLKIASVDTADTATYYCARMEDYGSSSYFDFWGHGTTLTVSS

SEQ ID NO: 296 - DNA, 321 bp, Mus musculus
  misc_feature (1)..(321): SC16.124 VL
  CDS (1)..(321)
gacattcagatgacccagtctcctgcctcccagtctgcatctctgggagaaagtgtcaccatcacatgcctggcaagtcagaccattggtacatggttagcatggtatcagcagaaaccagggaaatctcctcagctcctgatttctgctgcaaccagcttggcagatggggtcccatcaaggttcagtggtagtggatctggcacaaaattttctttcaagatcagcagcctacaggctgaagattttgtaagttattactgtcaacaactttacagtactccgtggacgttcggtggaggcaccaagctggaaatcaaa

SEQ ID NO: 297 - protein, 107 aa, Mus musculus
DIQMTQSPASQSASLGESVTITCLASQTIGTWLAWYQQKPGKSPQLLISAATSLADGVPSRFSGSGSGTKFSFKISSLQAEDFVSYYCQQLYSTPWTFGGGTKLEIK

SEQ ID NO: 298 - DNA, 369 bp, Mus musculus
  misc_feature (1)..(369): SC16.124 VH
  CDS (1)..(369)
gaggtccagctgcagcagtctggacctgagctggtaaagcctggggcttcagtgaagatgtcctgcaaggcttctggatacacattcactagctatgttatgcactgggtgaagcagaagcctgggcagggccttgagtggattggatatattaatccttacaatgatggtactaagtacaatgagaagttcaaaggcaaggccacactgacttcagacaaatcctccagcacagcctacatggagctcagcagcctgacctctgaggactctgcggtctattactgtgcaagaggggctctctactatggtaactacctcgggtacttcgatgtctggggcgcagggaccacggtcaccgtctcctca

SEQ ID NO: 299 - protein, 123 aa, Mus musculus
EVQLQQSGPELVKPGASVKMSCKASGYTFTSYVMHWVKQKPGQGLEWIGYINPYNDGTKYNEKFKGKATLTSDKSSSTAYMELSSLTSEDSAVYYCARGALYYGNYLGYFDVWGAGTTVTVSS

SEQ ID NO: 300 - DNA, 321 bp, Mus musculus
  misc_feature (1)..(321): SC16.125 VL
  CDS (1)..(321)
gacatccagatgaaccagtctccatccagtctgtctgcatcccttggagacacaattaccatcacttgccatgccagtcagaacattaatgtttggttaagctggtaccagcagaaaccaggaaatattcctaaactattgatctataaggcttccatcttacacacaggcgtcccatcaaggtttagtggcagtggatctggaacaggtttcacattaaccatcagcagcctgcagcctgaagacattgccacttactcctgtcaacagggtcaaagttatccgtacacgttcggaggggggaccaagctggaaataaaa

SEQ ID NO: 301 - protein, 107 aa, Mus musculus
DIQMNQSPSSLSASLGDTITITCHASQNINVWLSWYQQKPGNIPKLLIYKASILHTGVPSRFSGSGSGTGFTLTISSLQPEDIATYSCQQGQSYPYTFGGGTKLEIK

SEQ ID NO: 302 - DNA, 354 bp, Mus musculus
  misc_feature (1)..(354): SC16.125 VH
  CDS (1)..(354)
gatgtgcagcttcaggagtcaggacctgacctggtgaaaccttctcagtcactttcactcacctgcactgtcactggctactccatcaccagtggttatagctggcactggatccggcagtttccaggaaacaaactggaatggatgggctacatacactacagtggtagcactaactacaacccatctctcaaaagtcgaatctctatcactcgagacacatccaagaaccagttcttcctgcagttcaaatctgtgactactgaagactcagccacatattactgtgccctagaggggaattacgacgggtttgcttactggggccaagggactctggtcactgtctcttcn

SEQ ID NO: 303 - protein, 118 aa, Mus musculus
  misc_feature (118)..(118): The 'Xaa' at location 118 stands for Ser.
DVQLQESGPDLVKPSQSLSLTCTVTGYSITSGYSWHWIRQFPGNKLEWMGYIHYSGSTNYNPSLKSRISITRDTSKNQFFLQFKSVTTEDSATYYCALEGNYDGFAYWGQGTLVTVSX

SEQ ID NO: 304 - DNA, 321 bp, Mus musculus
  misc_feature (1)..(321): SC16.126 VL
  CDS (1)..(321)
gacatccagatgaaccagtctccatccagtctgtctgcatcccttggagacacaattaccatcacttgccatgccagtcagaacataaatgtttggttaagctggtaccagcagaaaccaggaaatattcctaaactattgatctataaggcttccaacttgcacacaggcgtcccatcaaggtttagtggcagtggatctggaacaggtttcacattaaccatcagcagcctgcagcctgaagacattgccacttactactgtcaacagggtcaaagttatccattcacgttcggctcggggacaaagttggaaataaaa

SEQ ID NO: 305 - protein, 107 aa, Mus musculus
DIQMNQSPSSLSASLGDTITITCHASQNINVWLSWYQQKPGNIPKLLIYKASNLHTGVPSRFSGSGSGTGFTLTISSLQPEDIATYYCQQGQSYPFTFGSGTKLEIK

SEQ ID NO: 306 - DNA, 348 bp, Mus musculus
  misc_feature (1)..(348): SC16.126 VH
  CDS (1)..(348)
caggtgcagatgaaggagtcaggacctggcctggtggcgccctcacagagcctgtccatcacttgcactgtctctgggtcttcattaaccaactatggtgtacactgggttcgccagcctccaggaaagggtctagagtggctgggagtaatatgggctggtggaagcacaaattataattcggctctcatgtccagactgagtatcagcaaagacaactccaagagccaagttttcttaaaaatgaacagtctgcaaactgatgacacagccatgtactactgtgccagagactgggagggctggtttgcttactggggccaagggactctggtcactgtctctgca

SEQ ID NO: 307 - protein, 116 aa, Mus musculus
QVQMKESGPGLVAPSQSLSITCTVSGSSLTNYGVHWVRQPPGKGLEWLGVIWAGGSTNYNSALMSRLSISKDNSKSQVFLKMNSLQTDDTAMYYCARDWEGWFAYWGQGTLVTVSA

SEQ ID NO: 308 - DNA, 321 bp, Mus musculus
  misc_feature (1)..(321): SC16.129 VL
  CDS (1)..(321)
gacattcagatgacccagtctcctgcctcccagtctgcatctctgggagaaagtgtcaccatcacatgcctggcaagtcagaccattggtacatggttagcatggtatcagcagaaaccagggaaatctcctcagctcctgatttatgctgcaaccagcttggcagatggggtcccatcaaggttcagtggtagtggatctggcacaaaattttctttcaagatcagcagcctacaggctgaagattttgtaagttattactgtcaacaactttacagtactccgtacacgttcggaggggggaccaagctggaaataaaa

SEQ ID NO: 309 - protein, 107 aa, Mus musculus
DIQMTQSPASQSASLGESVTITCLASQTIGTWLAWYQQKPGKSPQLLIYAATSLADGVPSRFSGSGSGTKFSFKISSLQAEDFVSYYCQQLYSTPYTFGGGTKLEIK

SEQ ID NO: 310 - DNA, 348 bp, Mus musculus
  misc_feature (1)..(348): SC16.129 VH
  CDS (1)..(348)
caggtgcagctaaaggagtcaggacctggcctggtggcgccctcacagagcctgtccatcacatgcactgtctcagggttctcattaaccgactatggtgtaagctggattcgccagcctccaggaaagggtctggagtggctgggagtaatatggggtggtggaagcacatactataattcagctctcaaatccagactgagcatcagcaaggacaactccaagagccaagttttcttagaactgaacagtctgcaaactgatgacacagccatttactactgtgccaaacattatggtcactacgctgcttactggggccaagggactctggtcactgtctctgca

SEQ ID NO: 311 - protein, 116 aa, Mus musculus
QVQLKESGPGLVAPSQSLSITCTVSGFSLTDYGVSWIRQPPGKGLEWLGVIWGGGSTYYNSALKSRLSISKDNSKSQVFLELNSLQTDDTAIYYCAKHYGHYAAYWGQGTLVTVSA

SEQ ID NO: 312 - DNA, 321 bp, Mus musculus
  misc_feature (1)..(321): SC16.130 VL
  CDS (1)..(321)
gacatccagttgactcagtctccagcctccctatctgcatctgtgggagaaactgtcaccatcacatgtcgagcaagtgggagtattcacaattatttagcatggtatcagcagaaacagggaaagtctcctcagctcctggtctataatgcaaaaaccttagtagatggtgtgccatcaaggttcagtggcagtggatcaggaacacaatattctctcaagatcaacagcctgcagcctgaagattttgggtattattactgtcaacatttttggactactccgtggacattcggtggaggcaccaagctggaaatcaaa

SEQ ID NO: 313 - protein, 107 aa, Mus musculus
DIQLTQSPASLSASVGETVTITCRASGSIHNYLAWYQQKQGKSPQLLVYNAKTLVDGVPSRFSGSGSGTQYSLKINSLQPEDFGYYYCQHFWTTPWTFGGGTKLEIK

SEQ ID NO: 314 - DNA, 360 bp, Mus musculus
  misc_feature (1)..(360): SC16.130 VH
  CDS (1)..(360)
gaggtccagctgcagcagtctggacctgagctggtaaagcctggggcttcagtgaagatgtcctgcaaggcttctggatacacattcactagctatgttatgcactgggtgaagcagaagcctgggcagggccttgagtggattggatatattaatccttacaatgatggtactgagtacaatgagaagttcaaaggcaaggccacactgacttcagacaaatcctccagcacagcctacatggagctcagcagcctgacctctgaggactctgcggtctattactgtgcaagaggggtctatgatggttactcttactttgactactggggccaaggcaccactctcacagtctcctca

SEQ ID NO: 315 - protein, 120 aa, Mus musculus
EVQLQQSGPELVKPGASVKMSCKASGYTFTSYVMHWVKQKPGQGLEWIGYINPYNDGTEYNEKFKGKATLTSDKSSSTAYMELSSLTSEDSAVYYCARGVYDGYSYFDYWGQGTTLTVSS

SEQ ID NO: 316 - DNA, 321 bp, Mus musculus; identical to SEQ ID NO: 272
  misc_feature (1)..(321): SC16.131 VL
  CDS (1)..(321)

SEQ ID NO: 317 - protein, 107 aa, Mus musculus; identical to SEQ ID NO: 273

SEQ ID NO: 318 - DNA, 351 bp, Mus musculus; identical to SEQ ID NO: 274
  misc_feature (1)..(351): SC16.131 VH
  CDS (1)..(351)

SEQ ID NO: 319 - protein, 117 aa, Mus musculus; identical to SEQ ID NO: 275

SEQ ID NO: 320 - DNA, 321 bp, Mus musculus
  misc_feature (1)..(321): SC16.132 VL
  CDS (1)..(321)
gacattcagatgacccagtctcctgcctcccagtctgcatctctgggagaaagtgtcaccatcacatgcctggcaagtcagaccattggtacatggttagcatggtatcagcagaaaccagggaaatctcctcagctcctgatttatgctgcaaccagcttggcagatggggtcccatcaaggttcagtggtagtggatctggcacaaaattttctttcaagatcagcagcctacaggctgaagattttgtaagttattactgtcaacaactttacagtactccgtggacgttcggtggaggcaccaagctggagatcaaa

SEQ ID NO: 321 - protein, 107 aa, Mus musculus
DIQMTQSPASQSASLGESVTITCLASQTIGTWLAWYQQKPGKSPQLLIYAATSLADGVPSRFSGSGSGTKFSFKISSLQAEDFVSYYCQQLYSTPWTFGGGTKLEIK

SEQ ID NO: 322 - DNA, 348 bp, Mus musculus
  misc_feature (1)..(348): SC16.132 VH
  CDS (1)..(348)
caggtgcagctgaaggagtcaggacctggcctggtggcgccctcacagagcctgtccatcacatgcactgtctcagggttctcattaaccgactatggtgtaagctggattcgccagcctccaggaaagggtctggagtggctgggagtagtatggggtggtggaagcacatactataattccgctctcaaatccagactgagcatcaccaaggacaactccaagagccaagttttcttaaaaatgaacagtctgcaaactgatgacacagccatgtactactgtgccaaacagaggggtcagtacggggcttactggggccaagggactctggtcactgtctctgca

SEQ ID NO: 323 - protein, 116 aa, Mus musculus
QVQLKESGPGLVAPSQSLSITCTVSGFSLTDYGVSWIRQPPGKGLEWLGVVWGGGSTYYNSALKSRLSITKDNSKSQVFLKMNSLQTDDTAMYYCAKQRGQYGAYWGQGTLVTVSA

SEQ ID NO: 324 - DNA, 321 bp, Mus musculus
  misc_feature (1)..(321): SC16.133 VL
  CDS (1)..(321)
agtattgtgatgacccagactcccaaattcctgcttgtttcagcaggagacagggttaccataacctgcaaggccagtcagagtgtgagtaatgatgtagcttggtaccaacagaagccagggcagtctcctaaactgctgatatactgtgcatccaatcgctacactggagtccctgatcgcttcactggcagtggatatgggacggatttcactttcaccatcagcactgtgcaggctgaagacctggcagtttatttctgtcagcaggattatagctctccgctcacgttcggtgctgggaccaagctggagctgaaa

SEQ ID NO: 325 - protein, 107 aa, Mus musculus
SIVMTQTPKFLLVSAGDRVTITCKASQSVSNDVAWYQQKPGQSPKLLIYCASNRYTGVPDRFTGSGYGTDFTFTISTVQAEDLAVYFCQQDYSSPLTFGAGTKLELK

SEQ ID NO: 326 - DNA, 357 bp, Mus musculus
  misc_feature (1)..(357): SC16.133 VH
  CDS (1)..(357)
caggtgcagctgaaggagtcaggacctggcctggtggcgccctcacagagcctgtccatcacctgcacagtctctggtttctcattaaccaactatgctgtacactgggttcgccagtctccaggaaagggtctggagtggctgggagtgatatggagtgatggaagcacagactataatgcagctttcatatctagactgagcatcagcaaggacaactccaagagccaagttttctttaagatgaacagtctgcaagctgatgacacagccatgtactactgtgcccgaaagaaaggaggatggtttccctggtttgcttactggggccaagggactctggtcactgtctctgca

SEQ ID NO: 327 - protein, 119 aa, Mus musculus
QVQLKESGPGLVAPSQSLSITCTVSGFSLTNYAVHWVRQSPGKGLEWLGVIWSDGSTDYNAAFISRLSISKDNSKSQVFFKMNSLQADDTAMYYCARKKGGWFPWFAYWGQGTLVTVSA

SEQ ID NO: 328 - DNA, 333 bp, Mus musculus
  misc_feature (1)..(333): SC16.134 VL
  CDS (1)..(333)
gacattgtgctgacccaatctccagcttctttggctgtgtctctagggcagagggccaccatctcctgcaaggccagccaaagtgttgatcatgctggtgatagttatatgaactggtaccaacagaaaccaggacagccacccaaactcctcatctatgctgcatccaatctagaatctgggatcccagccaggtttagtggcagtgggtctgggacagacttcaccctcaacatccatcctgtggaggaggaggatgctgcaacctattactgtcagcaaagtaatgaggatccgtacacgttcggaggggggaccaagctggaaatcaaa

SEQ ID NO: 329 - protein, 111 aa, Mus musculus
DIVLTQSPASLAVSLGQRATISCKASQSVDHAGDSYMNWYQQKPGQPPKLLIYAASNLESGIPARFSGSGSGTDFTLNIHPVEEEDAATYYCQQSNEDPYTFGGGTKLEIK

SEQ ID NO: 330 - DNA, 351 bp, Mus musculus
  misc_feature (1)..(351): SC16.134 VH
  CDS (1)..(351)
gaggtccagctgcagcagtctggacctgacctggtgaagcctggggcttcagtgaagatatcctgcaaggcttctggttactcattcactggctactacatgcactgggtgaagcagagccatggaaagaggcttgagtggattggacgtgttaatcctaacaatggtggtactaactacaaccagaaattcaagggcaaggccatattaactgtagacaagtcatccagcacagcctacatggagctccgcagcctgacatctgaggactctgcggtctattactgtgcaagagggagttatgataacgccgagggctggggccaagggactctggtcactgtctctgca

SEQ ID NO: 331 - protein, 117 aa, Mus musculus
EVQLQQSGPDLVKPGASVKISCKASGYSFTGYYMHWVKQSHGKRLEWIGRVNPNNGGTNYNQKFKGKAILTVDKSSSTAYMELRSLTSEDSAVYYCARGSYDNAEGWGQGTLVTVSA

SEQ ID NO: 332 - DNA, 321 bp, Mus musculus
  misc_feature (1)..(321): SC16.135 VL
  CDS (1)..(321)
gacatcaagatgacccagtctccatcttccatgtatgcatctctaggagagagagtcactatcacttgcaaggcgagtcaggacattaataggtatttaagctggttccagcagaaaccagggaaatctcctaagaccctgatctatcgtgcaaacagattggtagatggggtcccatcaaggttcagtggcagtggatctgggcaagattattctctcaccatcagcagcctggagtatgaagatatgggaatttattattgtctacagtatgatgagtttccattcacgttcggctcggggacaaagttggaaataaaa

SEQ ID NO: 333 - protein, 107 aa, Mus musculus
DIKMTQSPSSMYASLGERVTITCKASQDINRYLSWFQQKPGKSPKTLIYRANRLVDGVPSRFSGSGSGQDYSLTISSLEYEDMGIYYCLQYDEFPFTFGSGTKLEIK

SEQ ID NO: 334 - DNA, 363 bp, Mus musculus
  misc_feature (1)..(363): SC16.135 VH
  CDS (1)..(363)
caggtccagttgcagcagtctggagctgagctggtaaggcctgggacttcagtgaaggtgtcctgcaaggcttctggatacgccttcactaattacttgatagagtgggtaaagcagaggcctggacagggccttgagtggattggggtgattaatcctggaagtggtggtactaactccaatgagaagttcaaggccaaggcaacactgactgcagacaaatcctccagcactgcctacatgcagctcagcagcctgacatctgctgactctgcggtctatttctgtgcaagatcggactatgattacgccttctatgctatggactactggggtcaaggaacctcagtcaccgtctcctca

SEQ ID NO: 335 - protein, 121 aa, Mus musculus
QVQLQQSGAELVRPGTSVKVSCKASGYAFTNYLIEWVKQRPGQGLEWIGVINPGSGGTNSNEKFKAKATLTADKSSSTAYMQLSSLTSADSAVYFCARSDYDYAFYAMDYWGQGTSVTVSS

SEQ ID NO: 336 - DNA, 321 bp, Mus musculus
  misc_feature (1)..(321): SC16.136 VL
  CDS (1)..(321)
gacatccagatgactcagtctccagcctccctatctgcatctgtgggagaaactgtcaccatcacatgtcgagcaagtgggaatattcacaattatttagcatggtatcagcagaaacagggaaaatctcctcacctcctggtctataatgcaaaaaccttagcagatggtgtgccatcaaggttcagtggcagtggatcaggaacacaatattctctcaagatcaacagcctgcagcctgaagattttgggagttattactgtcaacatttttggagtactccgtggacgttcggtggaggcaccaagctggaaatcaaa

SEQ ID NO: 337 - protein, 107 aa, Mus musculus
DIQMTQSPASLSASVGETVTITCRASGNIHNYLAWYQQKQGKSPHLLVYNAKTLADGVPSRFSGSGSGTQYSLKINSLQPEDFGSYYCQHFWSTPWTFGGGTKLEIK

SEQ ID NO: 338 - DNA, 366 bp, Mus musculus
  misc_feature (1)..(366): SC16.136 VH
  CDS (1)..(366)
gaggtccagctgcagcagtctggacctgagctggtaaagcctggggcttcagtgaagatgtcctgcaaggcttctggatacacattcactagctatgttatgcactgggtgaagcagaagcctgggcagggccttgagtggattggatatattaatccttacaatgatggtactaagtacaatgagaagttcaaaggcaaggccacactgacttcagacaaatcctccagcacagcctacatggagctcagcagcctgacctctgaggactctgcggtctattactgtgcaagagacaggtcgggctacgaagattactatggtatggactactggggtcaaggaacctcagtcaccgtctcctca

SEQ ID NO: 339 - protein, 122 aa, Mus musculus
EVQLQQSGPELVKPGASVKMSCKASGYTFTSYVMHWVKQKPGQGLEWIGYINPYNDGTKYNEKFKGKATLTSDKSSSTAYMELSSLTSEDSAVYYCARDRSGYEDYYGMDYWGQGTSVTVSS

SEQ ID NO: 340 - DNA, 318 bp, Mus musculus
  misc_feature (1)..(318): SC16.137 VL
  CDS (1)..(318)
caaattgttctcacccagtctccagcaatcatgtctgcatctctaggggaggagatcaccctaacctgcagtgccagctcgagtgtaagttacatgcactggtaccagcagaagtcaggcacttctcccaaactcttgatttatagcacatccaacctggcttctggagtcccttctcgcttcagtggcagtgggtctgggaccttttattctctcacaatcagcagtgtggaggctgaagatgctgccgattattactgccatcagtggagtagttatcacacgttcggaggggggaccaagctggaaataaaacgg

SEQ ID NO: 341 - protein, 106 aa, Mus musculus
QIVLTQSPAIMSASLGEEITLTCSASSSVSYMHWYQQKSGTSPKLLIYSTSNLASGVPSRFSGSGSGTFYSLTISSVEAEDAADYYCHQWSSYHTFGGGTKLEIKR

SEQ ID NO: 342 - DNA, 351 bp, Mus musculus
  misc_feature (1)..(351): SC16.137 VH
  CDS (1)..(351)
gaggtgcagctggtggagtctgggggagacttagtgaagcctggagggtccctgaaactctcctgtgcagcctctggattcactttcagtagctatggcatgtcttgggttcgccagactccagacaagaggctggagtgggtcgcaaccattagtagtggtggtagttacacctactatccagacagtgtgaaggggcgattcaccatctccagagacaatgccaagaacaccctgtacctgcaaatgagcagtctgaagtctgaggacacagccatgtattactgtgcaagacgaagagccgatgctatggactactggggtcaaggaacctcagtcaccgtctcctca

SEQ ID NO: 343 - protein, 117 aa, Mus musculus
EVQLVESGGDLVKPGGSLKLSCAASGFTFSSYGMSWVRQTPDKRLEWVATISSGGSYTYYPDSVKGRFTISRDNAKNTLYLQMSSLKSEDTAMYYCARRRADAMDYWGQGTSVTVSS

SEQ ID NO: 344 - DNA, 321 bp, Mus musculus
  misc_feature (1)..(321): SC16.138 VL
  CDS (1)..(321)
gacattcagatgacccagtctcctgcctcccagtctgcatctctgggagaaagtgtcaccatcacatgcctggcaagtcagaccattggtacatggttagcatggtatcagcagaaaccagggaaatctcctcagctcctgatttattctgcaaccagcttggcagatggggtcccatcaaggttcagtggtagtggatctggcacaaaattttctttcaagatcagcagcctacaggctgaagattttgtaagttattactgtcaacaactttacagtactccgtggacgttcggtggaggcaccaagctggaaatcaaa

SEQ ID NO: 345 - protein, 107 aa, Mus musculus
DIQMTQSPASQSASLGESVTITCLASQTIGTWLAWYQQKPGKSPQLLIYSATSLADGVPSRFSGSGSGTKFSFKISSLQAEDFVSYYCQQLYSTPWTFGGGTKLEIK

SEQ ID NO: 346 - DNA, 348 bp, Mus musculus
  misc_feature (1)..(348): SC16.138 VH
  CDS (1)..(348)
caggtgcagctgaaggagtcaggacctggcctggtggcgccctcacagagcctgtccatcacatgcactgtctcagggttctcattaaccgactatggtgtaagctggattcgccagcctccaggaaagggtctggagtggctgggagtagtatggggtggtggaagcacatactataattccgctctcaaatccagactgagcatcagcaaggacaactccaagagccaagttttcttaaaaatgaacagtctgcaaactgatgacacagccatgtactactgtgccaaacagaggggtcagtacggggcttactggggccaagggactctggtcactgtctctgca

SEQ ID NO: 347 - protein, 116 aa, Mus musculus
QVQLKESGPGLVAPSQSLSITCTVSGFSLTDYGVSWIRQPPGKGLEWLGVVWGGGSTYYNSALKSRLSISKDNSKSQVFLKMNSLQTDDTAMYYCAKQRGQYGAYWGQGTLVTVSA

SEQ ID NO: 348 - DNA, 321 bp, Mus musculus
  misc_feature (1)..(321): SC16.139 VL
  CDS (1)..(321)
gacattgtgatgacccagtctcacaaattcatgtccacatcagtaggagacagggtcagcatcacctgcaaggccagtcaggatgtgaatactgctgtaggctggtatcaacagaaaccaggacaatctcctaaactactgatttactcggcatcctaccggtacactggagtccctgatcgcttcactggcagtggatctgggacggatttcactttcaccatcagcagtgtgcaggctgaagacctggcagtttattactgtcagcaacattatagtagtccgtacacgttcggaggggggaccaagctggaaattaaa

SEQ ID NO: 349 - protein, 107 aa, Mus musculus
DIVMTQSHKFMSTSVGDRVSITCKASQDVNTAVGWYQQKPGQSPKLLIYSASYRYTGVPDRFTGSGSGTDFTFTISSVQAEDLAVYYCQQHYSSPYTFGGGTKLEIK

SEQ ID NO: 350 - DNA, 357 bp, Mus musculus; identical to SEQ ID NO: 238
  misc_feature (1)..(357): SC16.139 VH
  CDS (1)..(357)

SEQ ID NO: 351 - protein, 119 aa, Mus musculus; identical to SEQ ID NO: 239

SEQ ID NO: 352 - DNA, 333 bp, Mus musculus
  misc_feature (1)..(333): SC16.140 VL
  CDS (1)..(333)
gacattgtgctgacacagtctcttgcttccttagctgtatctctggggcagagggccaccatctcatgcagggccagcaaaagtgtcagtacatctggctatagttatatgcactggtaccaacagaaaccaggacagccacccaaactcctcatttatcttgcatccaacctagaatctggggtccctgccaggttcagtggcagtgggtctgggacagacttcaccctcaacatccatcctgtggaagacgaagatgctgcaacctattactgtcagcacagtagggagcttccgttcacgttcggaggggggaccaagctggaaataaag

SEQ ID NO: 353 - protein, 111 aa, Mus musculus
DIVLTQSLASLAVSLGQRATISCRASKSVSTSGYSYMHWYQQKPGQPPKLLIYLASNLESGVPARFSGSGSGTDFTLNIHPVEDEDAATYYCQHSRELPFTFGGGTKLEIK

SEQ ID NO: 354 - DNA, 348 bp, Mus musculus
  misc_feature (1)..(348): SC16.140 VH
  CDS (1)..(348)
caggtccaactgcagcagtctgggcctgagctggtgaggcctggggcttcagtgaagatgtcctgcaaggcttcaggctataccttcaccagctactggatgcactgggtgaaacagaggcctggacaaggccttgagtggattggcatgattgatccttccaatagtgaaactaggttaaatcagaagttcaaggacaaggccacattgaatgtagacaaatcctccaacacagcctacatgcagctcagcagcctgacatctgaggactctgcagtctattactgtgcagtaatggactactactttgactactggggccaaggcaccactctcacagtctcctca

SEQ ID NO: 355 - protein, 116 aa, Mus musculus
QVQLQQSGPELVRPGASVKMSCKASGYTFTSYWMHWVKQRPGQGLEWIGMIDPSNSETRLNQKFKDKATLNVDKSSNTAYMQLSSLTSEDSAVYYCAVMDYYFDYWGQGTTLTVSS

SEQ ID NO: 356 - DNA, 321 bp, Mus musculus; identical to SEQ ID NO: 232
  misc_feature (1)..(321): SC16.141 VL
  CDS (1)..(321)

SEQ ID NO: 357 - protein, 107 aa, Mus musculus; identical to SEQ ID NO: 233

SEQ ID NO: 358 - DNA, 345 bp, Mus musculus; identical to SEQ ID NO: 234
  misc_feature (1)..(345): SC16.141 VH
  CDS (1)..(345)

SEQ ID NO: 359 - protein, 115 aa, Mus musculus; identical to SEQ ID NO: 235

SEQ ID NO: 360 - DNA, 321 bp, Mus musculus
  misc_feature (1)..(321): SC16.142 VL
  CDS (1)..(321)
gacatcaagatgacccagtctccatcttccatgtatgcatctctaggagagagagtcactatcacttgcaaggcgagtcaggacattaataattatttaagctggttccagcagaaaccagggaaatctcctaagaccctgatctatcgtgcaaacagattggtagatggggtcccatcaaggttcagtggcagtggatctgggcaagattattctctcaccatcagcagcctggagtatgaagatatgggaatttattattgtctacagtatgatgagtttccgtacacgttcggaggggggaccaagctggaaataaaa

SEQ ID NO: 361 - protein, 107 aa, Mus musculus
DIKMTQSPSSMYASLGERVTITCKASQDINNYLSWFQQKPGKSPKTLIYRANRLVDGVPSRFSGSGSGQDYSLTISSLEYEDMGIYYCLQYDEFPYTFGGGTKLEIK

SEQ ID NO: 362 - DNA, 345 bp, Mus musculus
  misc_feature (1)..(345): SC16.142 VH
  CDS (1)..(345)
gaggtccagcttcagcagtcaggacctgagctggtgaaacctggggcctcagtgaagatatcctgcaaggcttctggatacacattcactgactacaacatgcactgggtgaagcagagccatggaaagagccttgagtggattggattcttttatccttacaacggtaatactgtctacagccagaagttcaagagcaaggccacattgactgtagacaattcctccagcacagcctacatggagctccgcagcctgacatctgaggactctgcagtctattactgtgcaagacttaactgggagggctactggggccaaggcaccaccctcacvgtntcntcn

SEQ ID NO: 363 - protein, 115 aa, Mus musculus
  misc_feature (112)..(112): The 'Xaa' at location 112 stands for Thr.
  misc_feature (114)..(114): The 'Xaa' at location 114 stands for Ser.
  misc_feature (115)..(115): The 'Xaa' at location 115 stands for Ser.
EVQLQQSGPELVKPGASVKISCKASGYTFTDYNMHWVKQSHGKSLEWIGFFYPYNGNTVYSQKFKSKATLTVDNSSSTAYMELRSLTSEDSAVYYCARLNWEGYWGQGTTLXVXX

SEQ ID NO: 364 - DNA, 336 bp, Mus musculus
  misc_feature (1)..(336): SC16.143 VL
  CDS (1)..(336)
gatgttttgatgacccaaactccactctccctgcctgtcagtcttggagatcaagcctccatctcttgcagatctagtcagagcattgtacatagtaatggaaacacctatttagaatggtacctgcagaaaccaggccagtctccaaagctcctgatctacaaagtttccaaccgattttctggggtcccagacaggttcagtggcagtggatcagggacagatttcacactcaagatcagcagagtggaggctgaggatctgggagtttattactgctttcaaggttcacatgttccgctcacgttcggtgctgggaccaagctggagctgaaa

SEQ ID NO: 365 - protein, 112 aa, Mus musculus
DVLMTQTPLSLPVSLGDQASISCRSSQSIVHSNGNTYLEWYLQKPGQSPKLLIYKVSNRFSGVPDRFSGSGSGTDFTLKISRVEAEDLGVYYCFQGSHVPLTFGAGTKLELK

SEQ ID NO: 366 - DNA, 357 bp, Mus musculus
  misc_feature (1)..(357): SC16.143 VH
  CDS (1)..(357)
caggtccagctgcagcagtctggacctgagctggtgaagcctggggcttcagtgaggatatcctgcaaggcttctggctacaccttcacaagctactatatacactgggtgaagcagaggcctggacagggacttgagtggattggatggatttatcctggaaatggtaatactaagtacaatgagaagttcaagggcaaggccacactgactgcagacaaatcctccagcacagcctacatgcagatcagcagcctgacctctgaggactctgcggtctatttctgtgcaagagagagatggttactactatggtttgcttactggggccaagggactctggtcactgtctctgca

SEQ ID NO: 367 - protein, 119 aa, Mus musculus
QVQLQQSGPELVKPGASVRISCKASGYTFTSYYIHWVKQRPGQGLEWIGWIYPGNGNTKYNEKFKGKATLTADKSSSTAYMQISSLTSEDSAVYFCARERWLLLWFAYWGQGTLVTVSA

SEQ ID NO: 368 - DNA, 321 bp, Mus musculus
  misc_feature (1)..(321): SC16.144 VL
  CDS (1)..(321)
agtattgtgatgacccagactcccaaattcctgcttgtatcagcaggagacagggttaccataacctgcaaggccagtcagagtgtgagtaatgatgtaggttggtaccaacagaagccagggcagtctcctaaactgctgatatactatgcatccaatcgctacaatggagtccctgatcgcttcactggcagtggatatgggacggatttcactttcaccatcagcactgtgcaggctgaagacctggcagtttatttctgtcagcaggattatagctctccgtggacgttcggtggaggcaccaagctggaaatcaaa

SEQ ID NO: 369 - protein, 107 aa, Mus musculus
SIVMTQTPKFLLVSAGDRVTITCKASQSVSNDVGWYQQKPGQSPKLLIYYASNRYNGVPDRFTGSGYGTDFTFTISTVQAEDLAVYFCQQDYSSPWTFGGGTKLEIK

SEQ ID NO: 370 - DNA, 354 bp, Mus musculus
  misc_feature (1)..(354): SC16.144 VH
  CDS (1)..(354)
cagatccagttggtgcagtctggacctgagctgaagaagcctggagagacagtcaagatctcctgcaaggcttctgggtataccttcacaaactatggaatgaactgggtgaagcaggctccaggaaagggtttaaagtgggtgggctggataaacacctacactggagagccaacatatgctgatgacttcaagggacggtttgccttctctttggaaacctctgccagcactgcctatttgcagatcgacaacctcaaaaatgaggacacggctacatatttctgtgcaagagtgggggattacgtcggctttgactactggggccaaggcaccactctcacagtctcctca

SEQ ID NO: 371 - protein, 118 aa, Mus musculus
QIQLVQSGPELKKPGETVKISCKASGYTFTNYGMNWVKQAPGKGLKWVGWINTYTGEPTYADDFKGRFAFSLETSASTAYLQIDNLKNEDTATYFCARVGDYVGFDYWGQGTTLTVSS

SEQ ID NO: 372 - DNA, 321 bp, Mus musculus
  misc_feature (1)..(321): SC16.147 VL
  CDS (1)..(321)
gatatccagatgacacagactgcatcctccctgtctgcctctctgggagacagagtcaccatcagttgcagggcaagtcaggacattaacaattatttaaactggtatcagcagaaaccagatggaactgttaaactcctgatctactacacatcaagattacactcaggagtcccatcaaggttcagtggcagtgggtctggaacagattattctctcaccattagcatcctggaacaagaagatattgccacttacttttgccaacagggtgatacgcttccgtggacgttcggtggaggcaccaagctggaaatcaaa

SEQ ID NO: 373 - protein, 107 aa, Mus musculus
DIQMTQTASSLSASLGDRVTISCRASQDINNYLNWYQQKPDGTVKLLIYYTSRLHSGVPSRFSGSGSGTDYSLTISILEQEDIATYFCQQGDTLPWTFGGGTKLEIK

SEQ ID NO: 374 - DNA, 351 bp, Mus musculus
  misc_feature (1)..(351): SC16.147 VH
  CDS (1)..(351)
cagatccagttggtgcagtctggacctgagctgacgaagcctggagagacagtcaagatctcctgcaaggcctctggatataccttcacagactattcattgcactgggtgaagcaggctctaggaaagggtttaaagtggatgggctggataaacactgagactggtgagccagcatatgcagatgacttcaagggacggtttgccttctctttggaaacctctgccagcactgcctatttgcagatcaacgacctcaaaaatgaggacacgactacatatttctgtggtatttacgacgggtatgctatggactactggggtcaaggaacctcagtcaccgtctcctca

SEQ ID NO: 375 - protein, 117 aa, Mus musculus
QIQLVQSGPELTKPGETVKISCKASGYTFTDYSLHWVKQALGKGLKWMGWINTETGEPAYADDFKGRFAFSLETSASTAYLQINDLKNEDTTTYFCGIYDGYAMDYWGQGTSVTVSS

SEQ ID NO: 376 - DNA, 318 bp, Mus musculus
  misc_feature (1)..(318): SC16.148 VL
  CDS (1)..(318)
caaattgttctcacccagtctccagcaatcatgtctgcatctccaggggagaaggtcaccatgacctgcagtgccagctcaagtgtaagttacatgtactggtaccagcagaagccaggatcctcccccagactcctgatttatgacacatccaacctggcttctggagtccctgttcgcttcagtggcagtgggtctgggacctcttactctctcacaatcagccgaatggaggctgaagatactgccacttattattgccaggagtggagtaataatccgctcacgttcggtgatgggaccaagctggagctgaaa

SEQ ID NO: 377 - protein, 106 aa, Mus musculus
QIVLTQSPAIMSASPGEKVTMTCSASSSVSYMYWYQQKPGSSPRLLIYDTSNLASGVPVRFSGSGSGTSYSLTISRMEAEDTATYYCQEWSNNPLTFGDGTKLELK

SEQ ID NO: 378 - DNA, 354 bp, Mus musculus
  misc_feature (1)..(354): SC16.148 VH
  CDS (1)..(354)
cagatccagttggtgcagtctggacctgagctgaagaagcctggagagacagtcaagatctcctgcaaggcttctgggtataccctcacaaactatggaatgaactgggtgaagcaggctccaggaaagggtttaaagtggatgggctggataaacacctacactggagagccaacatatgctgatgacttcaagggacggtttgccttctctttggaaacctctgccaggattgtctatttgcagatcaacaacctcaaaaatgaggacacggctacatatttctgtgcaaaatatgaggcccacgaggggtttgtttattggggccaagggactctggtcactgtctctgca

SEQ ID NO: 379 - protein, 118 aa, Mus musculus
QIQLVQSGPELKKPGETVKISCKASGYTLTNYGMNWVKQAPGKGLKWMGWINTYTGEPTYADDFKGRFAFSLETSARIVYLQINNLKNEDTATYFCAKYEAHEGFVYWGQGTLVTVSA

SEQ ID NO: 380 - DNA, 321 bp, Mus musculus
  misc_feature (1)..(321): SC16.149 VL
  CDS (1)..(321)
gacatccagatgaaccagtctccatccagtctgtctgcatcccttggagacacaattaccatcacttgccatgccagtcagaacattaatgtttggttaagctggtaccagcagaaaccaggaaatattccaaaactattgatctataaggcttcccacttgcacacaggcgtcccatcaaggttgagtggcagtggatctggaacaggtttcacattaaccatcagcagcctgcagcctgaagacattgccacttactactgtcaacagggtcaaagttatccattcacgttcggctcggggacaacgttggaaataaaa

SEQ ID NO: 381 - protein, 107 aa, Mus musculus
DIQMNQSPSSLSASLGDTITITCHASQNINVWLSWYQQKPGNIPKLLIYKASHLHTGVPSRLSGSGSGTGFTLTISSLQPEDIATYYCQQGQSYPFTFGSGTTLEIK

SEQ ID NO: 382 - DNA, 348 bp, Mus musculus
  misc_feature (1)..(348): SC16.149 VH
  CDS (1)..(348)
caggtgcagctgaaggagtcaggacctggcctggtggcgccctcacagagcctgtccatcacttgcgctgtctctgggttttcattaaccagctttggtgtacactgggttcgccagcctccaggaaagggtctggagtggctgggagttatatgggctggtggaagcacaaattattattcggctctcatgtccagactgagcatcagcatagacaactccaagagccaagttttcttaaagatgaacagtctgcaaactgatgacacagccatgtactactgtgccagagactgggagggctggtttgcttactggggccaagggactctggtcactgtctctgca

SEQ ID NO: 383 - protein, 116 aa, Mus musculus
QVQLKESGPGLVAPSQSLSITCAVSGFSLTSFGVHWVRQPPGKGLEWLGVIWAGGSTNYYSALMSRLSISIDNSKSQVFLKMNSLQTDDTAMYYCARDWEGWFAYWGQGTLVTVSA

SEQ ID NO: 384 - DNA, 339 bp, Mus musculus
  misc_feature (1)..(339): SC16.150 VL
  CDS (1)..(339)
gacattgtgatgtcacagtctccatcctccctaactgtgtcagttggagagaaggttactatgagctgcatgtccagtcagagccttttatatagtagcactcaaaagaactacttggcctggtaccagcagaaaccagggcagtctcctaaactgctgatttactgggcatccactagggaatctggggtccctgatcgcttcacaggcagtggatctgggacagatttcactctcaccatcagcagtgtgaaggctgaagacctggcagtttattactgtcagcaatattatagctatccgtacacgttcggaggggggaccaagctggaaataaaa

SEQ ID NO: 385 - protein, 113 aa, Mus musculus
DIVMSQSPSSLTVSVGEKVTMSCMSSQSLLYSSTQKNYLAWYQQKPGQSPKLLIYWASTRESGVPDRFTGSGSGTDFTLTISSVKAEDLAVYYCQQYYSYPYTFGGGTKLEIK

SEQ ID NO: 386 - DNA, 351 bp, Mus musculus
  misc_feature (1)..(351): SC16.150 VH
  CDS (1)..(351)
gagatccagctgcagcagtctggacctgagctggtgaagcctggggcttcagtgaaggtatcctgcaaggcttctggttatgcattcactagctacaacatgtactgggtgagtcagagccatggaaagagccttgagtggattggatatattgatccttacaatggtggcactagctacaaccagaagttcaggggcaaggccacattgactgttgacaagtcctcaagcacagcctacatgcatctcaacagcctgacatctgaggactcggcagtctattattgtgcaagagagaactataggtactttgacttctggggccaaggcaccactctcacagtctcctca

SEQ ID NO: 387 - protein, 117 aa, Mus musculus
EIQLQQSGPELVKPGASVKVSCKASGYAFTSYNMYWVSQSHGKSLEWIGYIDPYNGGTSYNQKFRGKATLTVDKSSSTAYMHLNSLTSEDSAVYYCARENYRYFDFWGQGTTLTVSS

SEQ ID NO: 388 - DNA, 318 bp, Artificial Sequence
  Humanized antibody sequence
  misc_feature (1)..(318): HSC16.13 VL
  CDS (1)..(318)
gacatccagatgacccagtctccatcctccctgtctgcatctgtaggagacagagtcaccatcacttgcagtgcaagtagcagcgttagctatatgtattggtatcagcagaaaccagggaaagcccctaagctcctgatctacctcactagtaacttggcaagtggggtcccatcaaggttcagtggcagtggatctgggacagatttcactctcaccatcagcagtctgcaacctgaagattttgcaacttactactgtcaacagtggcgtagtaacccattcacgttcggccaggggacaaagttggaaataaaa

SEQ ID NO: 389 - protein, 106 aa, Artificial Sequence
  Synthetic Construct
DIQMTQSPSSLSASVGDRVTITCSASSSVSYMYWYQQKPGKAPKLLIYLTSNLASGVPSRFSGSGSGTDFTLTISSLQPEDFATYYCQQWRSNPFTFGQGTKLEIK

SEQ ID NO: 390 - DNA, 372 bp, Artificial Sequence
  Humanized antibody sequence
  misc_feature (1)..(372): HSC16.13 VH
  CDS (1)..(372)
cagatcaccttgaaggagtctggtcctacgctggtgaaacccacacagaccctcacgctgacctgcaccttctctgggttctcactcagcactagtggaatgggtgtgggctggatccgtcagcccccaggaaaggccctggagtggcttgcacacatttggtgggatgatgttaagcgctacagcccatctctgaagagcaggctcaccatcaccaaggacacctccaaaaaccaggtggtccttacaatgaccaacatggaccctgtggacacagccacatattactgtgcacgcatagtttcctttgataacgacgttgtctctgctatggactactggggtcaaggaaccctagtcaccgtctcctcc

SEQ ID NO: 391 - protein, 124 aa, Artificial Sequence
  Synthetic Construct
QITLKESGPTLVKPTQTLTLTCTFSGFSLSTSGMGVGWIRQPPGKALEWLAHIWWDDVKRYSPSLKSRLTITKDTSKNQVVLTMTNMDPVDTATYYCARIVSFDNDVVSAMDYWGQGTLVTVSS

SEQ ID NO: 392 - DNA, 321 bp, Artificial Sequence
  Humanized antibody sequence
  misc_feature (1)..(321): HSC16.15 VL
  CDS (1)..(321)
gccatccagttgacccagtctccatcctccctgtctgcatctgtaggagacagagtcaccatcacttgccgggcaagtgagaacatttattataatttagcctggtatcagcagaaaccagggaaagctcctaagctcctgatctatactgccaatagtttggaagatggggtcccatcaaggttcagcggcagtggatctgggacagatttcactctcaccatcagcagcctgcagcctgaagattttgcaacttatttttgtaaacaggcttatgacgttcctccgacgttcggtggaggcaccaagctggaaatcaaa

SEQ ID NO: 393 - protein, 107 aa, Artificial Sequence
  Synthetic Construct
AIQLTQSPSSLSASVGDRVTITCRASENIYYNLAWYQQKPGKAPKLLIYTANSLEDGVPSRFSGSGSGTDFTLTISSLQPEDFATYFCKQAYDVPPTFGGGTKLEIK

SEQ ID NO: 394 - DNA, 351 bp, Artificial Sequence
  Humanized antibody sequence
  misc_feature (1)..(351): HSC16.15 VH
  CDS (1)..(351)
caggtgcagctggtgcagtctggggctgaggtgaagaagcctggggcctcagtgaaggtttcctgcaaggcatctggatacaccttcaccaggtactggatacactggatacgacaggcccctggacaagggcttgagtggatgggatacatcaaccctacaactgtttatactgagttcaatcagaacttcaaggacagagtcaccatgaccagggacacgtccacgagcacagtctacatggagctgagcagcctgagatctgaggacacggccgtgtattactgtgcgagaggcggtagtaacttctttgactactggggccaaggcaccactgtcacagtctcctca

SEQ ID NO: 395 - protein, 117 aa, Artificial Sequence
  Synthetic Construct
QVQLVQSGAEVKKPGASVKVSCKASGYTFTRYWIHWIRQAPGQGLEWMGYINPTTVYTEFNQNFKDRVTMTRDTSTSTVYMELSSLRSEDTAVYYCARGGSNFFDYWGQGTTVTVSS

SEQ ID NO: 396 - DNA, 318 bp, Artificial Sequence
  Humanized antibody sequence
  misc_feature (1)..(318): HSC16.25 VL
  CDS (1)..(318)
gaaattgtgctgactcagtctccagactttcagtctgtgactccaaaggagaaagtcaccatcacctgcagtgccagtagcagtgtgagctacatgcactggtaccagcagaaaccagatcagtctccaaagctcctcatcaaggatagttccaaactcgcctcaggggtcccctcgaggttcagtggcagtggatctgggacagatttcaccctcaccatcaatagcctggaagctgaagatgctgcaacgtattactgtcagcagtggagtagtaacccgctcacgttcggtcaggggaccaagctggagatcaaa

SEQ ID NO: 397 - protein, 106 aa, Artificial Sequence
  Synthetic Construct
EIVLTQSPDFQSVTPKEKVTITCSASSSVSYMHWYQQKPDQSPKLLIKDSSKLASGVPSRFSGSGSGTDFTLTINSLEAEDAATYYCQQWSSNPLTFGQGTKLEIK

SEQ ID NO: 398 - DNA, 372 bp, Artificial Sequence
  Humanized antibody sequence
  misc_feature (1)..(372): HSC16.25 VH
  CDS (1)..(372)
cagatcaccttgaaggagtctggtcctacgctggtgaaacccacacagaccctcacgctgacctgcaccttctctgggttctcactcagcactagtggaatgggtgtgggctggatccgtcagcccccaggaaaggccctggagtggcttacagacatttggtgggatgataataagtactacaacccatctctgaagagcaggctcaccatcaccaaggacacctccaaaaaccaggtggtccttacaatgaccaacatggaccctgtggacacagccacatattactgtgcacgaagagttaactattattacgacccgtactatgctatggactactggggtcaaggaaccctagtcaccgtctcctca

SEQ ID NO: 399 - protein, 124 aa, Artificial Sequence
  Synthetic Construct
QITLKESGPTLVKPTQTLTLTCTFSGFSLSTSGMGVGWIRQPPGKALEWLTDIWWDDNKYYNPSLKSRLTITKDTSKNQVVLTMTNMDPVDTATYYCARRVNYYYDPYYAMDYWGQGTLVTVSS

SEQ ID NO: 400 - DNA, 321 bp, Artificial Sequence
  Humanized antibody sequence
  misc_feature (1)..(321): HSC16.34 VL
  CDS (1)..(321)
gacatccagatgacccagtctccatcctccctgtctgcatctgtaggagacagagtcaccatcacttgcaaggcgagtcagagcgttagcaatgatgtagcctggtatcagcagaaaccagggaaagttcctaagctcctgatctattatgcatccaataggtactcaggggtcccatctcggttcagtggcagtggatctgggacagatttcactctcaccatcagcagcctgcagcctgaagatgttgcaacttatttctgtcagcaggattatagctctccgtggacgttcggtggaggcaccaaggtggaaatcaaa

SEQ ID NO: 401 - protein, 107 aa, Artificial Sequence
  Synthetic Construct
DIQMTQSPSSLSASVGDRVTITCKASQSVSNDVAWYQQKPGKVPKLLIYYASNRYSGVPSRFSGSGSGTDFTLTISSLQPEDVATYFCQQDYSSPWTFGGGTKVEIK

SEQ ID NO: 402 - DNA, 354 bp, Artificial Sequence
  Humanized antibody sequence
  misc_feature (1)..(354): HSC16.34 VH
  CDS (1)..(354)
caggtccagcttgtgcagtctggggctgaggtgaagaagcctggggcctcagtgaaggtttcctgcaaggcttctggatacaccttcactaactatggtatgaattgggtgcgccaggcccccggacaaaggcttgagtggatgggatggatcaacacttacactggtgacccaacatatgcagatgatttcaagggcagagtcaccattaccagggacacatccgcgagcacagcctacatggagctgagcagcctgagatctgaagacacggctgtgtattactgtgcgagaattggcggtaatagtccctctgattactggggccaaggcaccactgtcacagtctcctca

SEQ ID NO: 403 - protein, 118 aa, Artificial Sequence
  Synthetic Construct
QVQLVQSGAEVKKPGASVKVSCKASGYTFTNYGMNWVRQAPGQRLEWMGWINTYTGDPTYADDFKGRVTITRDTSASTAYMELSSLRSEDTAVYYCARIGGNSPSDYWGQGTTVTVSS

SEQ ID NO: 404 - DNA, 321 bp, Artificial Sequence
  Humanized antibody sequence
  misc_feature (1)..(321): HSC16.56 VL
  CDS (1)..(321)
gagatcgtgatgacccagtcccctgccacactgtccgtgtcccctggagagagggccaccctgtcctgcaaggcctcccagtccgtgtccaacgacgtggtgtggtaccagcagaagcccggacaggctcccaggctgctgatctactacgcctccaacaggtacaccggcatccctgccaggttctccggatccggatccggcaccgagttcaccctgaccatctcctccctgcagtccgaggacttcgccgtgtactactgccagcaggactacacctccccctggacctttggccagggcaccaagctggagatcaag

SEQ ID NO: 405 - protein, 107 aa, Artificial Sequence
  Synthetic Construct
EIVMTQSPATLSVSPGERATLSCKASQSVSNDVVWYQQKPGQAPRLLIYYASNRYTGIPARFSGSGSGTEFTLTISSLQSEDFAVYYCQQDYTSPWTFGQGTKLEIK

SEQ ID NO: 406 - DNA, 354 bp, Artificial Sequence
  Humanized antibody sequence
  misc_feature (1)..(354): HSC16.56 VH
  CDS (1)..(354)
caggtgcagctggtgcagtccggcgccgaagtgaagaaacccggcgcctccgtgaaggtgtcctgcaaggcctccggctacaccttcaccaactacggcatgaactgggtgaggcaggctcctggacagggactggagtggatgggctggatcaacacctacaccggcgaacccacctacgccgacgacttcaagggcagggtgaccatgaccaccgacacctccacctccaccgcctacatggagctgaggtccctgaggtccgacgacaccgccgtgtactactgcgctaggattggcgactcctccccctccgattactggggacagggcaccctcgtgaccgtctcctcc

SEQ ID NO: 407 - protein, 118 aa, Artificial Sequence
  Synthetic Construct
QVQLVQSGAEVKKPGASVKVSCKASGYTFTNYGMNWVRQAPGQGLEWMGWINTYTGEPTYADDFKGRVTMTTDTSTSTAYMELRSLRSDDTAVYYCARIGDSSPSDYWGQGTLVTVSS

SEQ ID NO: 408 - protein, 10 aa, Artificial Sequence
  HSC16.13 CDRL1
SASSSVSYMY

SEQ ID NO: 409 - protein, 7 aa, Artificial Sequence
  HSC16.13 CDRL2
LTSNLAS

SEQ ID NO: 410 - protein, 9 aa, Artificial Sequence
  HSC16.13 CDRL3
QQWRSNPFT

SEQ ID NO: 411 - protein, 11 aa, Artificial Sequence
  HSC16.15 CDRL1
RASENIYYNLA

SEQ ID NO: 412 - protein, 7 aa, Artificial Sequence
  HSC16.15 CDRL2
TANSLED

SEQ ID NO: 413 - protein, 9 aa, Artificial Sequence
  HSC16.15 CDRL3
KQAYDVPPT

SEQ ID NO: 414 - protein, 10 aa, Artificial Sequence
  HSC16.25 CDRL1
SASSSVSYMH

SEQ ID NO: 415 - protein, 7 aa, Artificial Sequence
  HSC16.25 CDRL2
DSSKLAS

SEQ ID NO: 416 - protein, 9 aa, Artificial Sequence
  HSC16.25 CDRL3
QQWSSNPLT

SEQ ID NO: 417 - protein, 11 aa, Artificial Sequence
  HSC16.34 CDRL1
KASQSVSNDVA

SEQ ID NO: 418 - protein, 7 aa, Artificial Sequence
  HSC16.34 CDRL2
YASNRYS

SEQ ID NO: 419 - protein, 9 aa, Artificial Sequence
  HSC16.34 CDRL3
QQDYSSPWT

SEQ ID NO: 420 - protein, 11 aa, Artificial Sequence
  HSC16.56 CDRL1
KASQSVSNDVV

SEQ ID NO: 421 - protein, 7 aa, Artificial Sequence
  HSC16.56 CDRL2
YASNRYT

SEQ ID NO: 422 - protein, 9 aa, Artificial Sequence
  HSC16.56 CDRL3
QQDYTSPWT

SEQ ID NO: 423 - protein, 7 aa, Artificial Sequence
  HSC16.13 CDRH1
TSGMGVG

SEQ ID NO: 424 - protein, 16 aa, Artificial Sequence
  HSC16.13 CDRH2
HIWWDDVKRYSPSLKS

SEQ ID NO: 425 - protein, 14 aa, Artificial Sequence
  HSC16.13 CDRH3
IVSFDNDVVSAMDY

SEQ ID NO: 426 - protein, 5 aa, Artificial Sequence
  HSC16.15 CDRH1
RYWIH

SEQ ID NO: 427 - protein, 17 aa, Artificial Sequence
  HSC16.15 CDRH2
YINPTTVYTEFNQNFKD

SEQ ID NO: 428 - protein, 8 aa, Artificial Sequence
  HSC16.15 CDRH3
GGSNFFDY

SEQ ID NO: 429 - protein, 7 aa, Artificial Sequence
  HSC16.25 CDRH1
TSGMGVG

SEQ ID NO: 430 - protein, 16 aa, Artificial Sequence
  HSC16.25 CDRH2
DIWWDDNKYYNPSLKS

SEQ ID NO: 431 - protein, 14 aa, Artificial Sequence
  HSC16.25 CDRH3
RVNYYYDPYYAMDY

SEQ ID NO: 432 - protein, 5 aa, Artificial Sequence
  HSC16.34 CDRH1
NYGMN

SEQ ID NO: 433 - protein, 17 aa, Artificial Sequence
  HSC16.34 CDRH2
WINTYTGDPTYADDFKG

SEQ ID NO: 434 - protein, 9 aa, Artificial Sequence
  HSC16.34 CDRH3
IGGNSPSDY

SEQ ID NO: 435 - protein, 5 aa, Artificial Sequence
  HSC16.56 CDRH1
NYGMN

SEQ ID NO: 436 - protein, 17 aa, Artificial Sequence
  HSC16.56 CDRH2
WINTYTGEPTYADDFKG

SEQ ID NO: 437 - protein, 9 aa, Artificial Sequence
  HSC16.56 CDRH3
IGDSSPSDY
